United States Patent Application Publication US 2026/0191916 A1 - sequence listing, part 92

SEQ ID NO: 608 - DNA, 3931851 bp, Bacteroides caccae (residues 1-1,965,926 of 3,931,851)
  source 1..3931851: mol_type = genomic DNA
tagcacaggcacaaaagatacactattttatcaccatttttattataaaacagtaccatgcaaacattcacctatgaaggaatcagagaaaaagcactaaaacaaggaattacagataacaggcttagagttggcttatgggctagctcaaatggctatattaaaagcaaaagaaagatacaaggaaaggttatcacagtctattcaataccccaaatgcaatttaactaagatttatatgaagtgtcagattctcgtttttcaaagtgtcagatactcaaggataatatactaatacaaaatatactaatatccataggggtacaccccatttttcgtattttatatatgatactacacaaaccaacaggaataatttttaagaatagaaaagaagccaagatattttttggtacttcacaatacaggaagattgaaaaagaaaaacaggagattattttgattgataaccacgacttcatagctactgatgaaatatataacggtaaacaaagacctgatacgtattcctcaaagtaaaagtgccaatatggaagcggtactactttattatatacggactaaatgcaataaagaatgtgcttccgctattggagagaaaaagatgcaagaagaactaaatttatcagaaagtacagttgagggctatattggcaaattgaaagaatataaatcaatattatccataaaaactttgaatcccaataatgaagaggataaaaaagaaattgataaagctcttggtgtaccttatgagggagataaaaggaagaagaatttatactatttccatgaaccacaaagattctactttttaaatccacagtttatatacaggacggatattgagaacgaaataaaaggctttttaatccgtcttgcttgtttatgtgacataggtactactaagatttatactcccaattgcagaaaggagaaagcaaatataaagtccatagcagaagagttaaagatgtgcagggagaaagttaaaagcttattgagtaggtgtgagaatttaggattaataagagctataccacgtgggtatatcattttagaagattcctttctacttaatctcaatggtacattagaagatagggtatataatagtatatataagtattgtttagaaaaagaagtagtaccaccgaatagatatgaatttagcagcaaaggtaatccaatggaatgtgatgggcttctaatgtgtactccttatatatttgattggtggaatatgtataatgcaaaagcagtaaggtttaaggaatattcccctttaatgtttgaagtttatataagtgatattcttttaccaatgagatttccaatacttcccaaagaaccacattgggagtattttaaaaaagcatttttaaatataagtacaaaggcaagaaaaccacagatagtagagatgtgtataaacaatgaaagtgaatatccgtttataacagctagaagtatttatcccgaaaaattacaaaagtcagttgtttgggattgtgatgattgaaactagtttattagaaaactcgataaatgaagtataggaaaagatgcttactaaggtcaaataagcccattatagagactttgacgaataaagtagtctactacccaactaaaaacaaaaatagccgcaagcgagtacacttacaaatgtgctcaattgcggctttttttgtggaacttctaaattcttgtctaatacaaggaatatagcagttcgcaattttaaatatgggagttaattttcccaatggaagtgtgggaaaatgcaaatatgacctgtttgatttacatataattcaaggagttgaaccattgccaaacaggtagttcttgatttttaagaatacccaaagttactcataataaacaaggtaaaaaaataaacaatacttattctttgatattactacttagcatatctttatatggtagtataatactctcctttctattatagtgcatagtgatacataggcacgcaataaagtataggtacttatatataataccccctacctataaaaataagagcttaaatatatatcaacttacttctcctatgatttactgaattgaaagttacatgagcgaatgaacagtaccctctaacacccccctagggtagttggaagaaaagtgaaatatctattctccacgtaatcaatttataaatcatttaaaattttattcgttatgagaaatctacaaattattggcaatgtgccacaagtaagaagggaaaacaactttggtgaatatgcagaagaagcggtaataatcgaagaacaaccaaaagttaaaaaagagaatcctcatttcttggaagctaatacactagaggttacaatgcaacatttgaaagaagattgtattacacccgtatttgccaaagataatgagcttacaattcctcaccctgcatttattgatactgtttatgacgctgcaaatacgtttttcagtggtgaaagcattgataagcccgatattcgtgtaagtcacattatcaaggggagaatacccgaagcaatacacaaacctgcaaatcaacttcttgaaagtgataagactatctactacgaaagatgtgcttttattattcagattcctacgatttacgaaacagtgaacgggaataagttaatattaactattggtggtgttcgtgcttataatcacactaatctttattcaaagaaaggagcagaacgctttaaagtgtttattggctttacctgtaaagtatgcacaaatttgtgtgtatcaacagacggttttcttagttgcttggaagttactaataccaaagatttatatcgggcagtattggaaatgtttcagagttaccaacctgcaaaacatctacatttaatgcaaacacttagtaactcatatctcacagaacatcaattttgccaattacttggaagaatgagactttatcaatcattgccacaaggttatcagaaagatattcctaaaatgctcatcactgattcgcagataaatacagttgcaaaagcatatatcaatgataagaactttgggagcttgggaaatgatataagtatgtggaaattgtacaatctattgacaggggcaaacaaaagcagttatatagattcattcttggatagagcggtaaatgcaaccgaaatagcaacgggaataaatgccgctttgcatggagacactaaatataagtggtttattgattgattaaacaggggaatattcagaaatgggtattctcctattttattaactacgtaaaacaaagaatcatgttttattataagatatttgtttggctcttttgggtggtattgtcttttataacaggttgtgttccgttaatcttgcttattcttttagttggcttatgggcagtggaagaagcgaataatcgtcactaatatacaaagtgaatgtttcattataaatcagtaagttagctttataggttgcttggtggtattggtggaatattcacttttatttatttacctataaaattgaatatttatgagcttgaaatatagtaatacaacagccgattacctacaatggggagaagctatgaatctagttcgttctctttataaagatgaagattataagatgtccctacttattgcaataggttgtttttggggactacgaataagtgatatgcttgccttacattggaagcagattttaaatgttgatgaatttacgatagtagagaagaaaacaggaaagcagcgtactatcagaattaaccaacagctaaaacggcacattgcagattgttataaacagatacaaccgattggaataaatgcacctattttggtaagtcagaaaggaacagtttacagggtgcaaagtattgatgtattattgaaaaagatgcaaatcaaatacaagctatcggttaaaaacttttcatgccattcattaagaaaaacatttggtagacaggtgtataatatgaatagcgataattcagagttggcacttgttaagctaatggaattatttaatcattctagtgtatctattactaagagatatttaggattgagacaagaagagctattaaatacttatgattgccttactttttaataaacaatagttcttgctattacgaacgcttttcgtaactttgtggcaatttcagatacctaatgtgttagggctgaaaggacatattagttaacgaagagcgttttaaatattatcctatcgtgaaatctcgacaatttcaaggaatggggatagtaggcaagaacgctcacgtcaatgttatatacctatcttattggggatagtttatatatcgtttggcgtgggctattgtttattacccattctaggcagtcgagagcctcacgatagtaatattcaatagtttccacgcctttttcattgtgtaatactatccaaagggaacagggtagataaacgatatataactacgaatcagacataaagaaacaacttttgctactatcttttaagtagccaactcaatttttgagcagcttatactacaaattaaattattaacgaaaagattatttacagaatatgaaaacatttagattttttgcaactttattggttattgctttatgtgcaggttttacttcttgtagcgatgacgatgatgaaaatccattagtaggtacttgggttagtatagaggataggaactctgtggaatataaggacgtaatgactattaattcagacggtacaggttcaagtgcaatctatactaatgggcaattagataaagacggagtagaaaattttagatatacctatgacgaaaatagtaaggtctttacttggatatgggaagaagatagcgacggagagagtgatgtttattcaatgcatgttcgagaactgacaggctctaaattagttttagttgatgatattgatgaagaaggtgaaggagaggtaataacatacacaaaacaataattgggatttaaccgtatagtgctagtcttattaggctagcatttgcttccgtttaataagaaatagaatagattatggcatatactgtaagagatttatcaaatgctcaaaggtttgagtataaaggatatgaagtttttatgtattgtgttgaagatagcttttggagtggagaaaggacttataaagttgatataagtattagcgaccatgtttattatagaatagcagaagatatacagatagctcgttatcaacagcagagacaaagttattttccaacggcttataatagtgggtacaatggaacttatgacataatgcagaaactgaaagaacgcatattgtttagttcttcttttaatgttattgtgaaacgtaaatttactatactgaaagataatgagccttatgttagagatgcaatggaacaaataaaatctatcattgatagtaagtttggtaatgtggatgatagatttaaaaatattcaaaatattatttgacatgacaaggattggttggattattataggaatacttgtttatttcctgttgggttggattttaaaagatatagttttttctatcatcacaatcgaaagtgatactacaatgggagatattttgaagtatgagcaaattgtttactctgctttaacggctatttacattattataatgggagttgtgcaaggagacgaaaatggagactcaggacttcctattatgctggtaattgctacatattttggagcaaggtttctacctctttcaatgggaagtgttatattgtacagtgtattaaacattgtagctataatttggggagcttgtgagttgaaaaaatactaaaaaagaagaagtctaatgaaagagtttttaatgataatattagcaggagcggtaggtggttttatcttttcactcatagttaaatctgaaaacaaaagaaaacataactgataaaataaagatttatgggagcagtaataggaattgtaatttatgcaataatagcatatattacttgtccacgtaaagaaaatgggagttttgaagaaggagcagtagcattgtatatcatcattcctgttgtggttttggcgatttatcttatatgtaataattagaaaaaagtccatgaggaaaattttatattgcatattaccaatcttcttatgttctgttttatcttgtgataggaaaagacaatcaagtgaacaggatatgaaagattcgttagcagcagctaattttatgaaatgtgcaaagtttttgtataatactttgtttgatgatgagcttaaatactttaagccacgtatttttataaagtacaggcaacctgtaaatggctatgatgtaactgttatgtgtttgctttataactatacttatgataaagaaagaaatacagaaatttggggtaatgccttactttactttgaaaaggaagataacagattctatatttataatgaaagcttttctgacagtgttctttattatgtaaacgaacaagaagttagagataacatgatattagaattggattatttacctaaatcaacaaaggagtatttgagtcataactcaccattctttttctctgatgtggattttgacggagaagaagaattaattatcaataactggagatgtggtacaagacattgcaatacctatgatgtttacaagataaccaataatgaagtgaagcaactgacagaagcgccatttgttaatccaacaggaaaaatcagcaattataattcagattttgattctgtaaataaaactataacaatacacaaaagaacaggaagcgtttactacgatggttattataaatatggtttagctaaaaaggtaatattgaacagtgatgacagacttagcaaatataaccaaatagaactgatagaagcaaaaatcataggttatgataaaaatacagatagtaatactccaactcgtccatataggctgtataaaaagataaatgctagattacagaaagtaagagaaggaagatataatggtatttctgaatatgatactattgatataaataagattcataaataaaaatatatcaaataccttattcttatcaagtaacaagaatcaagaagctcatgattatgaagttagtaactatctacatactactattaatgttattactatcttgtactagtaaaaaggatagtaatatacaggctactattgacagcttatctatatatgacaatcattctactttggaaatatcagaagctaaacatttgcaatgggtagattctgtattaggagtaaaaggtgtgaaactgattgattacagaaatgggatataccaatatgatgatacaaggttttattggaatagggcttttgattatttcttggtatatccctctagctttacacatggaaaagaatcggatttaggcaatggcaatcatttcgtaaatgaagatagtacaatctgtttgaatgtgtatgctacttacttcgatgtttttaaggatgattattcgcttcgtgaatggtttgatatgatgattgattcagaaatagaacaaggctatagaattaccaagaaagatattacagaccatagttatactattgaaggcaatactaagggtggtagatgtttttacagtaaagctacttgtaaaaaaacttatgagcgtgatattattctaacagtgaagttggaatatactgattcaaaaaaggaagaagcgagagctattatctgtctatacaataatgataagattattgccaaagaattacattaatatattatttgagaatgattttggaatagtgcttattataggtgtacttttatacttcaatggcaaaaagaagtataacacggatttagaaactataaatccaccgatgactaagaaagaaaggaaagcattaatgttttatcgtaaaacaaaatgcaattggggtggtgattatagtgatgaagaaatggatggcgcaatagaacagataagtgacaaagagtatatagagtatttaagaagtatatcgaaatccaaagattaattcttatctttattccaacttaactttagtaataatgaatactgatatattaataggtacaatagcaggagacataataggttcttactatgagtttgccccaataaagtctatagacttctcgttattcaatggttcttcatcacactttactgatgatactataatgactatcgctaatgctgattggctattaactagcgatagtttattaggtattatgcaggattatggtaatcgttatcctagtagttatggaagtatgttttgcgagtggttaaaagcagataatccccaaccttacaatagttggggaaacggttctgctatgcgtgttagtcctgttggttgggcttttaatactttagaggagactttagaagctgccaaacaaagtgcagaagtcacacataatcatccagaaggaattaaaggtgcacaagcaacagcagcttgtatatacttggctcgtacaggtaaatctaaacagaaaattaaagagtatattgaaactacatttggatataatcttagtagaacctgtgacgaaataagacctacttactacttcaatgagagttgtcaaggtacagttccagaatctattatcgctttcttggagagtacagattatgaaagtgctattcgacttactatttctttaggtggtgatgctgatacaatgggggctatcactggtggaatagcagaagcatattataaagagatacctcaatacataagggaagaagtattgaaaagactaccaaacgaatttattgatataatgcagagattttatgagatgtttgtagataaaagaataataaagaacagcatttgaagaaattcaaatagtgtacaatctaactaacgatacggaattagaacatacttatatgtttaagtggtttcatagaagaaaggataatcatagtaagcatctttcagagtttaaagaaagattggttatgcaagagttagcttctttagatatagaagcaatcaagcaatttgctttaaaagattgggagcttggggaaactcatggtttaccacattggcaaagagtggaacgtaacggaataatacttgccacatcagaagtaaatattacggttgttaggttgtttgcttatctgcatgataaatgcagaatagataatagttatgatgttgaacatggaaaaagagccgctaatatgattaatgggattaggcacacattactaaaaagactaaccgataatgaatttgagttattgtctaaggcttgtgaacttcatactacaacattgcgaacaggtaactcaactattgatacttgctttgatgcagacagattagatttagaacgagttggtataataccatatccaaataaaatggctacttcaaagggagaatattatgcgaagaatcttagtgaattttacgatttagcagctttaataactatgggataataaaaaagcatattggaaaacagcatttgaagaaattcatttgctgtttttttattatcattgcaaacaaaaacactatgaagccagtagataagttctcaatccaatatagcgagttgctagagtatatatatccagtgacacaagaatatttccctgattttgactatgacgaagaaacaggacagacatatatattgccgtcacaaacgccagacacttttaaaggaagatacaacagaggaatattgaaaggtagattctcgtttgattcatacataaagaataaagaactacaagaattgcttgctgtattgggcttagacgctgaaaagttctggtatctattgcttttctgttatgattgcagttggggtaaatgtatggagggtatagaaataaaagaatcccctaaagaacaaatagaaaaatttgttaatgctatcagtgaggattataaaagagatactccgtttggtgcagtctttaaaagcccaatttgtattacattgaaaataggtaggaagaatatcgtgatagataataagacggctattgctagtatagcaaagttttgtgcagacggattggaaacagtaaattcagaccaaatgaatactagccatgtcgatttgagcaatccacatactgaatcattctccgtattcgcttattatttctcacaaatgattatcactgccttgaattatcaagaacaggtaaaagaaaagagaaagaagggagctaatatgtctgacaaggaaaagacgctgatttctcatctactatactttacaggtattgtgaacaacgaaagtgtgttggttgattatgactacttgaagtctttgttgaagcaatataaagataaggacataaggagtttgaacgcattttattattgattgagacttattttattattcatttctgctttcttattctctaaatacttcattctacagcttgtgaagtaggggaataagaaagcagtgtttttttattcccgttagcttctaaagaaaagggcaatctttgtggtataaaataatcggtgagccagataccaaaataagtccgcagggcagcggcaatattaagatgaataaaaatgaagtaacaacattaacctcgttagtagatgaaggtaaaaagattgcacgtttaagcggtaatcgtgatttgaatgaaaagattgtgaaggctaaaatgaaaacacttgaagagtgtggacaattaattcctgccatagtggtagatgctactgatgttatgaatcaagggctggaagttgttgattttactacaggtgatattataagagaagaagaagctgtggattatttggtgttggtggaaggtaatcatcgctatgaagcgcaccttagacttatggcgagtaatgaagaacgggatgagcaaaaacgttataagagagaatttaagttattgtatgctttgaatacggaactaccaatagctaagatgttatcagaaatcaatattgctactaatccgtggaagggcagcgactatgtgaaaggagcaaaaataaacaatcagcaaaaaaaactacctttgttggatgctatgaataatttagtaaataaaggttattctttaacttcagcatcgaagtggctgaccttcacctcaaggattaataaaaaagttatggattgtgccatagacggtaacattgttgacgagttgaataataccagtggtttgaaaagggggataagacttttacaagcggcagaaggtatttttaaagaaacgacaatacaggcacgaacagtaatcgactggataatatccaagtatgaaaaaactagtgataatctcaaaccagaatttacagacaaaatggaacgctttttgaaaaatattagtgaagaagatgctgattatattgaaaaagccaagggaactaaaggaggtgatacgaaagaaaatattatcaataataaattgagtggattgtgggacggatttgaaaaataatccgtagagataagaagccagtaggtgcttcctgctggctttccaacaagaataataactaataaaaacatattatgattaaggagagtaaaggctatatgtatgaatttgtgacacacacatggaatcctattaagggtaaatgttctcatggctgtacctattgctatatgaaaaaaatgtgttctcgtttgaatacccctagattagatgcggcagaattgacctgctatcttgagtgctcgaattttatttttgtaggaagtagtattgatatgtgggcagaagatatacccagccattggattaaaatggttttggactattgtgataggtctgccaacaaatatttgtttcaaagcaaaaatccttccagaatattagattttataactcatcctgtatttcatcattcagtgatttgtacaaccatagaaaccaataggttttatccagaaataatgcgtaactcaccaaagatagaagaaagggtaagagcaatggaaaaaattgcaaatttgggtataaatacctatgttacgacagaacctttaatgcagtttgatttggataaaatggtggagtacataaaacgatgtaaacctctacaagtaaatatagggcggaatacgaacagaaaagtacagttgccagagccaacagcaaacgaagtgaaagtacttataacggaactagaaaagttcacaaaggtggagataaagaaaaatgcaagaatatggtttaagtgagataaacatatagcctagaattgaaaagacaactatcgtaaagcgcatatttcatagccgattatcagaaatggtaatcggcttttttattctctaattatttcaaaaaaacaaagtacaccgccaatactaaacacataaacgcagcaaaatgattccaatgcaaagtttcccctttaaaaagaaccgtagtaaatattgtaaatattataagagtaattacttcttgaataacttttaattgcattaaagaaaatggaccaccattatcaatgaaaccaattctatttgcaggaatttgaaataggtactcaaagaaagctatcgaccaactgaatgcaactaccccaattagaggtaaagatgcaaaccaaccgtattcctgtttcattttaagatgtccataccatgcaaaagtcataaagacattagacacgatgagtaataatattgtataaacagctttcatatatattttttatttacataagtatattgaaattttaaatctttttctcatgggtatttttgactatttatattcaaaaaaagcaattgcccagctaaaagcaattacacctatcaacggaagagaagcaaaccaagtatattcctgtttcatcttcaagtgaccgtaccaagcaaaagtcataaagacattggatacgataagcaacaaaattgtatatattcctttcataacaaccgattttaattaatctattttatccggtaataattcttcctgtacattcgtcatgcttccccaaagactgtaacgggcctccggattcatctcctccagttgccgcaaaatccctttcatatcgctccggctggattgtgattcgtaagggcaattctttacttgcttctgataactgtgtaaagccgccaactctaccaagtcagcttcgtggaccaaacacatcggacggataatcgtcatatcaaacttcttcatcaccaaacggggaggcatggtgctaaatgctccctgataagtgacattcatcagcaatgtttccagaatatcatccatgtgatgccccaaggctatcttattacatccatgctctttggcaactgtaaacaaagctttccggcgattccacgaacaaaggaaacagggagacttacgtgtatcggtagccggatcgaaggctgtctcatattgtacaaaaggtactccatacgcttcacaatgcgctttcaaatatgccgtatcactctgataagggatatttttcatcaccacatgaactgcgacaaccgaaaagcgaggtttatagatacgtacacgcttacccagcaattcgacaagcgccaacgaatctttccctcccgacagtccgataaggattttgtctccttcttctatcagtccatattgcaccactcctttactgaaccgcctttcaacgcggcgaatggttttctcttcttccgtaaattgtgtcatatcttcaaaaatcggctgcaaaagtaagcgaaaagaatgatttaaagaagaattaacataatagaatcgccgaaaaagggtttatttctaataaatttgtacttttgaacaattgataaattgactgttgaccgaaaacgataccgttttctaccaaaccgtcactcataaacgctaagaacgatgaaaagaaaatatattttatttctaatttgcagtttcttccttgggggagtttctgcgcaaacactggaacaggcacgcaccttattcactaaaggtgactacgagaaagccaagcctgtctttaagaaatatgctaaatcccaaccgtccaatggtaattataattactggtatggcgtatgttgcctgaaaacaggagaagctgaagaagctgtgaaacctctcgaaatggctgtaaagaaacgggtagccagcggacagctttatctgggacaagcttacaatgacacgtaccgttttgaagatgcagtgaactgcttcgaagaatatatcaccgacttaaagaaacgaaaacgccctaccgaagaagctgaaaagctgttagagaaaagcaaagccgatctccgtatgctgaaaggcgtagaagatgtctccattatcgacagttttgtggtagacaagtctactttcctgaatgcttataaaattagcgaagaatcaggtaagctgtttactttcaacgagttcttcaaaactgaaggcaataacccgggaacagtctacgaaaccgaaatcggaaacaaaatctattatagcgaaaaaggcgaaagaggaaatctggatattctttcaaaaaataagctgttagatgaatggagtaacggacgtccgttgcccggcagtatcaatgattccggaaacgccaactatccgtttgttatggcagacggtgttactatttattacgcaagcgacggcgaagggctgggaggatatgatatctttgtcacccgttacaatacgaacaccgatacgtatcttgtaccggagaatgtagggatgccgtttaattctccctacaatgactatatgtatgtgatcgacgaatataataatctgggttggtttgcttccgaccgtttccaaccggaaggaaaggtctgcatctatgtatttatccccaacaattcaaagcagacctacaactatgaagctatggaccagcagcaaatgattcggttggcacagattcattcgttgaaagaaacatggaaagataaaaaggcagttgccgaagcacaacagcgtttggaagccgctatgagccataagccgcaggaacgccggattgcagatttcgagtttgtgattgatgataatacgacttattatcttctgaaagatttcaaatcggccaaggccaaacaactcttccaacgttaccagcaaatggaaaaagactatcgtcagcaagaagaaaaactcaatagcatgcggctacgttatgcaaccggcaataaacaggaaaaaacaatattgactccggccattcttgatttggaaaagagaatattgcaaatgtccggcgaactggatgctcttgaaataaatgtacgaaacgcggaaaaaacaaaataataataactctgaactatggatatacttattatcaccgttctcattatcgccgcagtaatactgtttctggtagaactgtttgtcatacccggtattagtctggcaggaatctctgcactggtttgcatcatttatgccaattactatgcatttgccaatctaggtatggcagcgggattcattaccttgggaatatcaggagtagcctgtatcgggtcgctcgtctggttcatgcggtcgaaaatgctcgacaaactggctctgaaaaaagacattgattctaaggtagaccgtagtgcagaggatagcgtaaaggtaggcgataccggtatcagtaccacccgcctggcacaaatcggttatgcagaaatcaacggaaacatcgtggaggtgaagtcgatagatggcttcctcaacgaaaagacgccgattatcgtaagccgtatcaccgacggtacaattatggttgagaaacatagaaaataatattcacttaataaaaacatcaatggaatcatctttctacttgcctatctttctgatagccggaggtattatcttcctgataatatttttccattacgtgccgttcttcctttggttgtcggcaaaagtatcgggagtcaacatctcactgatacaactatttctaatgcgtatacgtaacgttccgccgtatatcatcgtgccgggaatgattgaagcccacaaagcgggattgaaaaacatcacccgcgatgagttggaagcccactatttggccggaggacacgttgaaaaggttgttcatgcgctggtatccgcatcgaaagcgaatatcgagctacctttccaaatggctaccgctatcgaccttgcaggtcgtgacgtattcgaagccgtgcaaatgtctgtaaacccgaaagttatcgacacacctcccgttacggctgttgccaaagacggtatccagttgatagccaaagcacgtgttaccgtacgtgccaatatccgccagttggtcggtggtgcaggtgaagatacgattcttgcccgtgtaggcgaaggtattgtttcgtctatcggttcttccgaaaatcataagtcagtactcgaaaatccggattctatctccaaactcgtgcttcgcaagggattggatgcaggaacggctttcgaaatcctgtctatcgatattgcggatattgacataggtaagaacatcggcgccgctttgcagattgatcaggctaatgcggacaagaatattgcgcaggcaaaagcagaggaacgccgtgcaatggcagtcgcttccgaacaggaaatgaaagccaaagcgcaggaagctcgtgcgaaagtaatagaagcagaagcagaagtaccgaaagctatggcagaagccttccgtagcggtaatctgggtatcatggattattaccggatgaaaaatatcgaagcagatacttccatgcgtgaaaatattgccaaaccggtaacaggaaacaccggtaatcagccgttgagcaaataatttattataaacgccggaacccggtttcaattctgttccaagatgtatgctcttttttctgcggaaaaagaaagatacctcttccgaacttaaatccggttccggcgtttgtatttatagatacagtcttattgtaaaactaaaacctttcaataacatgaaaaagtactttccatcctctgaattgattatcaacgaagacggctctgtattccatcttcacgtaaaacctgaatggttggcagacaaagttatcctggttggtgatcccggacgtgtggcactcgtagcttctcatttcgaaaacaaagaatgcgaagtggaaagccgcgaattcaagacaatcacgggtacatataaaggtaaacgaattactgtcgtttctaccggaatcggttgcgataatatcgatatcgtaatgaacgaactggatgcattagccaatatcgacttcgagacacgagaagaaaaagaacagttccggcagttagagttagtacgtatcggtacgtgcggcggtttacagccaaatacaccggtgggaacattcgtatgttcgcagaagtctatcggtttcgacggattattgaatttctatgccggacgcaatgctgtatgcgacttggctttcgaacgtgctttcctcaaccacatggggtggtcgggaaatatgtgtgctcctgcgccctatgttattgatgccagcgaagaattaattgaccgggttgcgaagaatgatatggtacgtggcgtgacaattgccgccggaggtttcttcggtccgcagggacgtgagctccgtattccgttggcagatccgaaacagaatgataagattgaagcgtttgaatacaaaggtttcaagataaccaatttcgaaatggagagttccgctttggcaggacttagccggttaatgggacacaaggccatgactgtctgcatggtaatagccaaccgccttatcaaagaggcgaataccggatataaaaatacgattgatacgttgattcaaacggtgctcgacagaatataaaaaacaacaagataataaccacttaataagaaatggcttgaattatacattgtgatatatattcaagccattcttcttcacttattgattcacttatataatttccgactgtttatcgattcgctcctttctttaatcaataaccaatcgtaaatctctcttgatgatgttgcggatgttccagttcatcaatcatggcggccgcataatcctctacagaaatatgactgttccccacaatgtccacaatcatgtcatcctttcccagacgataacgtcccgtacgtactcccggtcgcatatccgctgccggagagaaaaacacccagtccacttctttctctttcgtcaggaacttcagataaaactctcccaaagcttttactccgggcaaaagattctcgggtacttcaccggaatccattaatcgcaagccgggcgcaataaacaatgaacctgcaccgcctaccataagaaaacggttgactcctgctttcttcactccgtcaataatagtcagatagactttaattgtctcatcatatatatcgggattattccatcccggattaaacgcactgataacggcatccgcccctttacaaacttcgtatacttcttcaagagaagacacatccgccttcgtcactttcagattctcattttctatctttatcttttcagggtgccgaaccacggctgtcacttcaaagccacggttcaaagtctcattcaaaagagctgagccaacaaaaccactcgctccgatgagtacaaccttctttacttccttcatattccaacaaaattagagtgttattattatcttaataacactacaatttccggaatgttgattccctttcagaaaattaatcaaccaatataggattctatcgtttctctcagtttttccatggaataaggtttcgatatgacagcgttgcatcctgcctgaatagcctgctactctgtataaaatgcataagccattacagcgataatgggtaccgcaaaagacatagtacaaatcttttccatagcctgaatgccgtccattacaggcatacgaatatccattaatatcaagtcgggcttttcacggataaagaatctcgtgactcatatttgctagaaaaacagactttagcttatcggcgtcttctgccaccgtttcgtctcaatcaattccctcgagcgacaaatccgatcactgatatcatgaatcaggaccagcactttattcccttcaaaaggagcgatactcatggatattggaaatattcttaaccttctttaaaatatacacttaaatattttataatcaatatgttataagaaaggtgattttaatgaagaaacaaataaggaacaaaaataggaattaaagtgatttctcatttttctatttgcactctgtttctttcttttcgtttgtttgctttcagagtgcattccgagcaattttatctgctctcatcattcgaagaatttgctcctaactttaactaacaaattatttgcagctcataaagagaatacaaattattatctcttgaagttgtattgcttgtagcaaagataatcttttttgtacaggcagccaaaaatgcctgcctatatttagtttaatttagtttagcatatataaggctaacaaactaaaccaaactggattttcatgttactttttgtgattttcccattgtacccatacagccaaaagagaagataagctcttgcctcttttctcttttcgctgcgatactcttttacttcatagctaccttttacacacatccgtaccgagcaaactcccacatgctcgcatatcaactttcggtctgcctgatgggaattgtgtcgcaaaggtatttgccatgtctttattgtatgcaaggttgtaacctgaagtttcactacaaaatctccacgctccgcttcgcagaggtagtattttgtagtgaaaccctgcatacatagccatgccacctgttgaagcgacataatttcaatcaagcccgaaagtaagtgaaatgctacaggagggaaagtaacaaacttaaaacttggtatttatggcaaattatgcaaccaacattttccacgcaagaacggaaaataaaacagacctcgacaaaatagaggctttcttggatgacactttcagcgaatttaccaatcgatatggtgatagtgtagatgcataattttcctctcgttgggtgtatccagaagaagaaatcaaaaaattggtagaatcgttggaggacaaagataaagtctatatcaagattctaacctatgaatttgaagacgagtacgtgagctttagaatattctctcagggagaatggaaggtcaaattagtaactgaatgagtagaagaagataaagtaaaattatggtctatcctacactttgcttattctataagagacacacggatggaacgattgtcggtgatttcgacaacaaaatcactgttcgtttcatctgtggcaaagagagagtattaaatactgtgatgaagtaatttttacaattttacaacatagaaaccatgacacagatagcaatgaaattcgtccaatgggatgtgcccgaattggaaaaactgaaagatagcaaggtttacaaattacgggaacgtcttgataatggcgacaagttgagtcgggaagaaaagaactggctcacccgcaatgtgaaagagtgctgccatttcaaaagaggtatcgctttaatgggctaccgttttgacttctccgatgttctcaaacggtatttcgtgaaacaacacggacatattgctgaatattatgccattgacaaaaccgcactacgttctgtcctatatggtcgaattgaagatataatcgaagtacaataaaaatcaaaagaagcatgaaagtaacaattgaacacagcttttgcccctattgtgacgaggtaactgaactttatttccgaatcattaacacgattcttttttctggcaatgaggcggaattgcgtgaaagcatgagacagttggagaaaaaaactccacttgatgaatatttcacatacggttacggtgcacgacacctttgggtttgccagcgacgtcccagcgacaaaaccaaaatattcgagcatcgtattatgatggttgaatttcaatgacaccttggacaaatatcatcgactggctggaatggaatcacccatttcagccttacttccattttccttttataactttttcttttggctgcgccactcccttttgtagaaaccagccattcgcacaaagcgaattggaaaccactttgtgaaaagtctggttcttcctgccgtttttccttccagttccattttttttcgatgcggatatcactatcctccaaggatgggctacctacgcttctgtccactcttggctgacacattccttatgcagtggccttttttctgattggatggtattctgtttgttacagtctcaattcaagccaggcatgtctcgctttggctttgctattcttcactgactttcggacggatgtctcgcctttgtgccgacatttggatttgctctttttccttatcattaccggtttacttgtttcccattttccataatcgctttttatcgaagcaatcatcatttttcctctgcaaagatagtatgccgacgggaacgacatggttgtcttgaccaatggcgtagccgcttcaatcttcctttatcgagccttcgattttacctgtggctaaaaataaagcgtattgacgcgctatccttggtgcatcccttaaacgacatctactttttaggcagtgtaaaaattgatttaataacttctaaaagcaattcaacatgaaaaagattgaaaacaatttcacagtaaccggattcttaggtaaagacgctgaaatccgagagttcaccaacagcagtgtcgcacgtttcccattggccgtaagccgtcaggaaaggaatgccgaggaaaccaaccgcatttcagcctttatgaatattgaggcttggcgtaaaaacgagaatactgggtcattcaaccaactgaccaaaggtacgatgctcaccattgaaggctactttaagcctgaagagtggaccgacaaggtcggtgtgaagcacaatcgtgttgttatggtggctgtcaagttttatcctcctatcgaaaaggaggatgttcctgaaaagccggtaaagcccgtgaaaaaaggcaaaaaataattcttgccttatcatgaacaaagcgatcttttggtcgcttttgttttgctcatgaccggattaatacgcatcatacttttataagtgactgttgcgatgccaagctccaaatgaaatcttcacccggtaatactgttatacttagctccacttgatgaacaggcagattacgattttcaatagaaaaaagaagactctctcaattccatacctctgagcagctttccagtccctcttataaccatatttcttcccaaaagtgaggttacgtccgccgtccattaattttacagtgcgaagttaagtcggacgtgaacctgcaaggcgcgtttcatttgcagtcaatgccgttcaaatgaaatccttcggattccgcttcctccttgcattgttcccttcttccgccttgtggtttgcacgtaaaatcaaatcccaccggacgaggtaaaagcctctgaagggaagggaaaataaaaaattagaatgtatgaaacaaataatttggtcaagtgatgctctattggatgaaacagcaagagagtattatcaaaatttcaagcgagaagaactggacgatgatgcctacaaggtcagcgatgaagagtggtcggacgaagtgtataatgaattgggggatgagcggcagaacctaaacaaggatgtcaatggagtcattattgcatttggagatttaggattgtggaacggacgcaaacaaggctatcaaattttgggtgacaacattgccgggatattacaatctacacagtatgatgcagagtggtacggtgacggctacgatatacgaggccgtatgtcgcaccatgatggcacgaattatgttttgtaccgtgtcgctgaaaatcgtgacgacgcagaacggattgccgcaaaaatctacaactatgaaattgacgagaatggttttcgccaagttacacgttccctccacccctatgtggccgcagtgtatggctggaaaactctacaggacaacctcgttcaggtaaaatagcctgtaacctgtacttaaacaaatgccgtaacgctttctcaagaggctgttacggcacttgtgttttatgccgtatatattctgcataaaatgtggtgggaaactattcctttttacacatttatgaatgttcccgcccaactgttgtaggtggccgcttgcgccagtttccttttttagactccggccctcctttatagccccatccagctaccccctatatttctatcccgcaagcctggttatttccctgcaaaattcgattgccggctgtccgtcctgtcaaggaccgctgacacttgctgctgtaaaatcttcctctccgaaatatcgaagagtgtattttccgcatcctccttgcccgttctggccgccaatcccgtgggcagaaaaataatcaacctttcggtacaggaagtatcgaagggaaataaataaaatattaatcttaaaatttgaggcattatgacattcagagaatttatgttagagaacggttatgaattgcaaacaaccttttggaatgatttttccattgctgaccgatttggtctttcggcgatacaggacactttcaaccgtgcttttaaggagtggaaagagaactacaagtatctcacggaactggttttagtgcttaaccataagatatggcagtattatgaaacaaggccggaaattgcgacattgtataataccctttgggcacaagccagtcaatatgcaatggagtatctgaaagatgacgagctaagctattattatgatgtaacggattaaatgtcccagctcctcccacaggaacaaaagaaagccggcttttgtcggctgctctttgtggtcattcccttttttatcactccgttttacccttgtataaaacgaaattatttcgtttcaggctgctaccagtcaggacttgttttttcctgtgcaaaggtattgccacggaaaaacattcaagtaccgctacgctatttgaacacaatttttcagtagctttcccgattttcaatcgctcaaatgtcgtatacgctccataccgcaactgtaaaaattctgtccaaattccttgcctgcttttccttaaaggcaatcttgaatgcacgtaaaaatcaaatcccgactggagaagcctaaaggcttccgaaaaaagggaaaaaaagaacatgatgtttaatagctaaattttaaaagtatggaaattcaatttgtgattgttcgttcagaaaatgcagagtatttgtgtcacaatgtaaatggaacgtatgtggatgtcagcgacccatcaacagaatttgtttctggagaggatgattttcgcttggtagagccggacagctccctaacgcggaaagaatacgagtttcgtggagaacgcttttatctcatgcctcaattttatggcaatggctggttagcacttactttgcaaagtgtggaagatgaaacagagtatatcgtgctatccgtcaatttggagagcatggatgcactcgatttgccagaccgtacatttattgatgtgaatcattatccggatgcaatggagtttctggagacaaataatttagcgacctattcaggttacaagcgtagaagcggatttgtggaatatccaatggcggtattgaatcttcctttgctttatcagcacgccccgcagattttccaagaggcgaatatcgaatgtttttaaatggttttctgaaagtatggtactgatgactaccaaagagataccgtatcggttaaatcctatcggtatggtatcttcttttgcccgaagacaggtggcatcccccttttttacagattgctccgtgcccacttttttaatttccttgtttcccttttatagcagcgtaactgcctgcttctcttttacagcccttatgtaatgaatgttgatgtttcctgtcgttatccagactttcgcccggtcttgttttcgtgtgcaaaattacggcgaacgaacgctatccaagtatcgctacgctatccgaaatgaaatttgacgtaatcttcctaaatcatagatttcggtattcataaaatttcatttccgattccttgcactgcgttcctgcttcgtcgtttgggacgcacatgaaaaacaacccttccggcaaagtcgaaagacttgaaaaaagggaaaataaaaaacttaattaaaaacgaaaacgagtatgacaatagaagaagtattacagcacgatttaaaattcaggtatatgttattgggtcgtttgcaagccgactgtgaatattatcttggctttggaaacaaaagttctcgtcgtttgtgggctggttctgaaaagacacaaattgaatacatgacgaaaattcacgacagcttccgagaaaacgaaaaacccgaatggctgacaatggagcaaatcaaagaatacagcaatgctatgggagtaacacaagaataattcaaaaaaaataccgtaatgacctttaacggaggtgttgcggtattacagtattacaaataagggtctgagtttgagaacataccctcttataattgagagggtaataataatccctcttttataattatatcattctattccttttttatatttctgcaaaaggaatagcattcttcttttatattaattatttttcattttatctcccatctattcttcatcctatcaccggtttggttttatcagatgcaaaggtcggctatcgcgcttgatcctgctacttgaagtgtatttcttacaaaattcttccttcctgcgcaagagtaatttggcaagaaaagttgccgtatgaagctgtatcgacatccgtttaccgcatccataaatcccaaaacggttcaatcagtaaagaaccgacaatatgggaaataaaagttaatactaaccaattctttaaacattaaaatcatgcctaattatgtaacaaaccgtttagaaataaacgcagacagagaaacagtacaaaatgtgatggatttcttaaaaggaaaaactgatgaagacagtacgccttgctatattgacttcaacaacattatccctatgccaaaggacttactgatagaagcgtccacttctggggaatttggtatgcagtatatcatagcacagcaacgtaaaccgttcaattcacaggacgacctgaaagtcattcaatggatggaaattcagaaggaaaaagtcagggaagaagcattacaacttggaatgacatatctgagaaactggggaaaatacggttatcctacttggtatgaatggtctattgccaactggggtacaaaatggaatgcctttaatcagaattttgaagaaccgaacgtgctttggtttgatacggcttgggaaggtgtgccgctgcttatccaaacactctccgaaatatttccggacgtcgagtttcaatatgcctatgcggatgaagaccttggttccaacgtgggcaaagggactatccgaaatggagaaaccgacatgacattccccgataacggaagtaacgatgcctttgaaattgtctttttcgtaaaaccgggattagaggaatacttggaactgacaaacgaggggtataggtggaaagcctaaacatctccggacagacaatatccgacatgtattcagggtatatctcaaccgatatatcctggattcctgttgccggaagctccgtttatatttattccattccacttcctttttacaatttcacgcctcttgaaccagtcttttttgaccgtatttatcccatcccttggctggcctatttatcatctttgaagctgcttttactgaaaccgccaaacacgcccttcaagagcttgccgacaacccagaataccagcaatacaattataatatctcccataaatcttacttttatagctttaacaataataaaaatacaaaataataaccgaaaaacaaatatacgatcctgattatctgaaaattccatcaggagccaccttcatttgttccgtcctctttcgggttctgtttgacacgcggaccgctggtttggccacgatcaagttttacgccatatttattgagtatgcgccaaatagaacttttgctgctaaaaccgcttgcaacccaaatgtcatcgaaagaatgcccgttgatatacatatccacgattgtcttatctcgttcagctttaggtaataccttcggcacagccggggctttgatattctggcgtaacttctcgacatgagcggaatattttcgtagtgcggcaatttcttccggaaatgcccctattatccacaacacatcggctgctgtcgtaccggggaataattcaccgcgagtatcaactctgtcatgaatggatatgacacgtacaattttgatacggcatagttcgatgaacgcggccagttctcttaagccgcgtgcagcattgctgaatttggatatgactatttcatcgcccctttgaagattcgccataagctgtttccacataggtctcaatgtttcatgttcaactgtttcctctacgatttgtacacaaccgtatcgctgcatccattctctctcagcatcaaaactgtcattattttccttgaatatatagccaacttttgccattttaatatacactgttttgataacaagtgcaaatatagcactttcattttaatctaaaatcatatcgtggcaaaaatctcgctgaatcctttttttagctttttttcttgcacttgttttcattgataatcatattattaatatgataccaaaaattatactaaatgcgatataaaagagcttttacaataaaaataatatatagatttgcatcgttaaatatgaattgttaaatatgaaaattttaaaatcatactacaagactccatcatttttgactggaagatgtatcgtttcattggccatattgggcctgatatcatgcagcgatagaaatggcaaatcattgtctgaagctacgaacgatcctgccggaatatacagggagtacttatacaatatacgatgtcagaaagattcctcatttcaagtattgaccaagcatatcctacaatggcaaactgtaaaagactctgtttttaggtatctccggaatgatacgctcagccactcccattccaatcagcgtgaagagtgtatcagactgcatgattctatccgcactgagttctcacgcttagccctctcaaagacgcgtacttatcaggaacttttggctctcaaaggagagttctcaccttataacaatgatgaggaactgcatcatgccgctggagaaatccgcccgtttttcaactcactggataatcttccgcttcataagggtaacaaagaggaaatccttgcggcttaccgtatgttactgactcgaactatccgtaacggcatacatagccgcaatgaactgattacttatatcactaaagaagatgctatattccgtgcgttcctctctcacttgcacgatttcgaaggtgagagtatggctgacatcacacgtggtactgaacagtgttgttcgcagatattctttgccgctgagagaaaggagattacctatcgggaggctatgctttatttgacaatgcgcaccaatcgtcgccaaatacaaaatatgcagatttgtatagaagatgttcggaacaaaaaaatcaagacttcttcgcaagcacatgcttatatatggatgcttatccacccttatacttcactggacggattctctatgacattgctttccgataaagaacggaaacaacttgacaggatggcggcacagacacctgtggcgttcaaaaccttgagccgaatcctgcaattggaaagtggtcaactgactgaactgccaggaatgcttatggatattttcatacagacgctctaacaatataaaaaatgaatatgttacgacattttttcaatgactttatgacatttgtccctctgcaactaccgcaactactcgatgtgacgacaatggaggaagcacaattctacggtgactacgccctactgaccttcccgctacgcgacccttacgatttggaggaagtgatggatctgtttgaggacgatatggagcttataactctctaccaccacatccccacgcacgctgacaaattcgggcatagcacctgtgcatactccaacccggcatttggacagatgttcaagatgaattgcaagacagatgcagacggtaaggtaaatagcattcttgtcaccatctatgattctcttgagcagatgtacggcgagctgtgccttgatttggatcttcattccaaaagtggcacattcaagtataagaagaacaaagacgatctcttgatggatttcctttaatggtcatgttatgcgggacacactataccgacaaatggtttattggattagggaataccggacatggatagaggttgttgatgacaatttctataaggagtatgctttgtcaagaaacggatatatcaattacattgtttcccgcacattggtactgcgggcttacaaagacaaaggctcatacgccaaaggcatgacatggacaattccggaacataaactggataaggcattggcagcctaccgtaagcaggagcatacgttcaagcaacgtattaagaaagcagcgatatacctttcaccgagggacgccgaagttatcatcctattagccacccacaatattgtccaattagagttgatgatatcccccattcaaatacgcgagaaaccctattatttatgatttggaatatactacaacttatcttctgtataacgcttttcgtattgccattagcattgtacaaaagccaccgttcttttatggtaaggttctacgatgctatgatacacagtgtaaaggctcgtaaactatatgtacaggtcgtattgattctgctattgctcttccactatgtttacatcagcggacatgttggcgagttcggtgtttttctttcaactgctatctgtgccactatatattcatttagaagagcggacagattgttaagaggtttatgtgaccgatcatgtatgtttgtcatactctcattggtggctttggccatcagttttgttccacacttgtacacaacggcggtaactgccgcctatcttcttttggctgccctgttctatccctctgttcgggttatgaccgaatttcaggacataggcataatctctgaatggatgaaattccccagactattagccgaaagttattatgaccatcatcacgcgatattgccgcaagatgcggatagcggcaacactgatatatccgcacaatagtaataattaaaaaatgaaataaaaatgaaaaccaagcagaaaatagctgtccctatattggcagacagagaagtatttgactacctcaaggagaaagtcggtgaacgaaaaacaaagacagaagccttctgtgatttattggataaatctttggcaggttttgtttccccttttttaaggaacaaaggctacgaacttcaacccaaccagtgccacgtgactgtttctgacctttcatcggaatggcattggcatagggctactgtccgttcttttttggatgtaatggaagagttcggcttgttgaatcgcatccggctttccaaaagcgtcatcattaccatgactgtgcaaaccagccaatccacggagtcttgcaatggacagaagaagttgaaccttgcagaacagctacgtgaggcattgtccgattggataatcggcaaagtgtcccttgacgagatcggaatcaagtgtgagcaacttgttcgtcgggcaatggatgaagctggcatatgcgatagctgcccatctccggacagtatcactcgcatcaatccggcagcggatgatgatgaacgagctgtcaagattcgtatggtagctttggagtgcattacatttgccgctatacaacgggcactgcgtaagtcgagattcgatgacagtgcagagtttatggactacttccgattggaattgtatggggactggacaggacttattgcaacttcgaaaggtattgccgggcttattcttgatgtagatagggatgaaaattccgattatgatgaagatgacagggagttccttaaaacgctttttaagccttttctggcatttgcggcaaaggcacaggaggcaacgtatcagattggaggttgaaaacagaatgtataaccgcaacaatccacttttgtatccagtgaagcccccctgccagttatagaaggcatccgggcttgcccgcctgccacgaacaaagggaagggggagcctaataccccacctgcctgacgttggtgggaagggtgtccgaacaagcagcaagctgggacacggtagattgtccgaaacaatatgaaaaacgtatggcaaatcaaaaacaggtactcgacgtgcaggtgtcgaaagggattaccaccgcccaaagtaatgaacatctgcgtgaccgtagtgaaaaggcagagaagtacgctatgagtaagggaaattatgatcctacgcgtaaacggctgaacttcgagattgcgcccggaggtaaaatacatcccatcgacacaagccgtagcattcccaaacggatggcggacatattaagtcaccgtggaatcaaagatcctaatgaggggctgctcgaaccaaaataccgcacggtggtaaatatcatcttcggcggttcacggcagcgaatgcaggaacttgctttcggtacgcaacaggtggactttgaaaaaggtgcggacaatacccgcatcgaacggaagcgtgacattgaacgctgggccaaggatgtttattcattcgtttgtggcagatatggtgagcagaacatcgctgcattcattgtacatctggatgaattgaacccgcatatccactgtacgcttctgccaatcaaggatagtcgctttgcgtacaaggaaatcttcgccggtaaggataagtttgaatatagtgcaagaatgaaacaacttcatacggactttttcgcagaagtcaatacaaagtggggaatgtcaagaggaacaagcatatccgaaacgggtgcacggcacagaacgactgaggaataccgccgaatgttgtctgaagagtgtacaacaatcgaggataatatcaaactccatcaacaggtattgggtgaacttcaatcagacatccggttggcagaacgcagagtcaaagggcttacgacaatggttagcaatcttgaaaagcagaaaactgaaaaagaaaccttgttatcggcagccgagtacaatttaaaagaaaacaaaggcaatgcggcagaattggcaatccaaatacaaatgttggaaaaagagctgcaaggaatcatcagacaactggcagacaagcaggaaaagttgcagacggctgaccggcaactcatcgaactgaaaaaggatatgggagccattgaagaacgtaccgaagaactcaaagaggaggcctatcaatattcccgtgatgtacactccaaagtggatagcttgtttaaagacgtcctactggagagtgtaatcagcgagtatcgtaacgcatcggcacaaatgaatgtttcagaacggcagctctttgacggttcactggtacagtctatcgccgagcggggtacggaaatcatgcactgtgcgacaatgctatttctcggaatggtagatgatgccactacatttgccgaatcacatggtggtggaggcggagggagtgacctcaaatggggacgcgacgaggacgaggacaatcgagcatgggcacttcgctgtatgaggatggcgagccgcatgatgcgctcgactatcggcaagaaatctaaacggtaaatggcatacgccttacaccagattaaaagtataactaatgaaatcattggaatatgacgaaacaaattattttcatcttcgctttgctctgcacgttgcaggcacaagcaagtgtacaacccgtacagaaggacactgtacgacacactattcattatgaagtagcggaattgcttcaaccgatgcagcccgtctatctcaacggggtgctacttccggcatctcgaaccggcaactggtttgttagcatatccggaggtgcgacagtttttcttggtacacctctcggttgtgaagacctttttggacgagtgaaaccttcgtacagcctcgccgtcggcaaatggtttactcctttggtcggcgcaagggtaaattatagtggcttgcagtttaaggatgcacaattatctacgcaggactaccattatatccatgcagatctcctgtggaatctccttggacgcagatatgcccgacaggaacaggtacgttggaggcttgcaccctttatgggtgtcggtctgctacataacgccaccaacgggaacaatccctttgcgctttcttacggcatactaacacaataccgtatttccaaacgggttagtgctatgctggaactctctaacacaactacattccaggatttcgacggatatggctatccaaaccgtctgggcgatcacatgctttcgctgactgccggattcacctttcatctcggtaaggtcggctggaagcgcgcggtggatacggcaccatacatccatcggaacgaactgcttgtcgattatggcaacttcctttcggaggagaacaggcgttatgtgggacgtcacaatcaagataagcgaacactcgtggaattaaagaaaattctggaaatcgaaggactactcgatacatatagccatatctttgacaacgacgatataaccggatgcagatatcctataaataattatagcggtttgaactcgcttcgtgcaagattgaagcatagctattgggacgggtcgtcacctcttgacacgactattcttcagacagagaatggaaagccatcatataattacacggcttcccgaaatgtgcagtccgcccatcaggacaccctcgctatggattccacggttctttcatacgctgatggagagtgcatcggtacacccatctatttcttttttgctctcaatacgacacatctgacggatacctcacagaggcttaatcttgacgaactggctcgtgtagctaagaaatacagtttatccgtgagggtaactggtgctgctgacagttctacaggaacatcaagtatcaatgattctttgagtatatcgagagcaggttttattaccgcagaactggaacaacgtggaataccagccaagcggattatcagagttagcaaaggtggaattgccgactatacgcccgtggaagccaacagacatacgaaagtggagttgttttttccaaaagcgaaatagaaatttcgcataattgatgtttaactttgtcataatcaatgaagcctctccgctgtgaagcgaagaggctttttcgatatggtacacgtgaagttcgccattttcctactgtcagaaccagaatgaaaattatttcgatgcttcgagtgactcttttctgaactgtttgagaagtttttcaagttcaagtgatactttgcgggcacgagttccggcagctttgttgcctttctccatctggaggttggcatcttttgagaattgatcgaacaattcacagatttgtgtaaatgtttttttcattgttatgttcttaatattatataatacgctggcaaagatagcaaaaatatttttttaggacttatattagctctgttatatatttcgcctataatatgatacccctttttatgtttttccattctgagtattcccttatcgcaccatcggcaaatctggccgaagagattttatatgcaaaggtacagtgtccggacgattgtcaagcaccgctatgctaacggttcctggatattttacggcagccttcctcaaatcaaagattgactttcagtccccttctcattgcaaggtataaaaggacaagcctgcttctgctcttacattcgaaggttgggtattccgttccattccatttactgtttacttgtcttatcgcccttattccactgttaatcctgcataaaaatcaatccccggcaagaagccgaaagagcttcaagcaaagggaaataataaatcaaagaatatgggaaaatacgattttatcaagttgggtaatcttctttattggcatgacccagatagtggtctgtctaatggggtttaccaagtggcttctattccggaaaacattgaagaggatagcgttattttgattgcatctgatacttcggaagcggaggtttttccttctgaattatcaccgatacataccggtagaagtcataaagaagactttttgcgttggaaaacagaacgtgaagctgaaggtattgagttttacgaccacctttccaaggtgatggatacggaaaacgacttgagtgtgggagatatggtggcgtttacaaacgattatggagtgatatttggaccttgtgaggtcttagcttttgggaatctctgtaatagtggcagatgtgtatatattgacagtgattcttattggtttcctaaccgtcccgaccaactcaccatcatgagaggtgcggaatgacaataacatatccacctgtagccaaagcgggtggatagcatttccttgtattgtatattcagcccgattactcttatagccatgctccaccgaactcccacaaccggtcctattccttttttactcgtcgtactccgtttctaaacagtataacacatttattggcctgacattcttgaaattcacaacggaaacagcttggtttccgtgtgatgaaacacttgaactggtatgtgagaaattcccaacactatgttatttctatcaatcggaagagtcgggtctggcggagtactggacaaatgaccaagagagtaaatactttcccgaaaagtacattgcagacctatgtactccagacgacaaatggtacaaggaatattttgtcaaccagacagaagtattcaagtggtttgaggtgataagcggtcagtctgtcgaatcaataacagaaattcttgctattgccgaacaacggaaagatgaaaacgacaattctttctgtaacatctatgaatatgccgcaggctaagactaatccgatgcagaaaacgaaatgacggtatgctgacagcgtgcagcgaactatcattatccgataagcttctctgatttgccatgcagattggggagactttgtcgccttcagtccttttatacagtctcagagtgcttctccagtcttttatattcttccaatccggatattctttatatcgcacatcggcagttcttatctgagagattttgtatgcaaagatacagctttagaatggtcgtcaagtaacgctgcgctaacagttcccggatacttgtggcagccttccgcatatcgaagatttgggtattccacttcattccatccactgtttacttgccttatccatcctttccttgctgtcaatttcgcataaaaatcattcctgacaagaagccggaagagcttcaagtaaagggaataaagtttaatcatttaaatttcaaaattatgcacagccgaatttttcagatttctaaaatgtggatagaaaaagaaaactatctgaatgaagacactctccagcagggagatggcagtttctatgactattgtgcggagatagatgacgaaaaacgtaaggaagatattcgttatttggtcaatactgctctaccaaaaggcatgttcgaacttgtaggcgacgacaccatgcgctacattggtggtgtggaacaatggaaagagaattttgtgactaacatccgtaagaaagctgaagctattacaaccgaaaacatgttggagtttgtaggtcctgtttatcaacttgaaaaggcattggaaaatccattggatattgcgtatcatttctatttggacggagatggataccaatcatttgccgaaaaatcttttgcatttatggagtttgtctgtacgcttgaaccgggaacgatactttatattggaggagtcatcgactatcacttctgatattccatataaaatttttacgcaactatatactttattgtaccaacgattgtgtataatgactggttggactttaatgtgccaatctgcgacttagcagattggcattgttaaagccacatcagcttattattctcatgacaaacaatacaattgcacgcgttttgcctttacactggtatcacggaatatttatagaaaatccacaagcccttcttgcatatatcttcgagctttttcttcctcttcaagggttaaatctctggaaatttccagaaaactcgcccagaatagtgttgacaatttaccatatgcttcatctgatatttgttcgccttcttggagtgatttcatccactgttggttcttttttataaacccaattggatttgtgaaagaagaaatatcctcccatctatcatagtttaacccttctgaaagagatttctttttcaatatatcatcacactttcctttgcaacaataatatgctttttgataaacatcttttccatttgatgatttttgatttgctaaccatgtaacaaaaattcccatagaatctttttcaagtaaatttttaccgcagcactcacataaaatttctactttttgaaataattttctgttttccataatgttttgttttaatgaattatacaaaggtaatgaatttgtttcaataaaaatactatagatgcatattttgaagtaaaaaaatggagtatgcgcttgtttttattttgaagaatgattcgatttgccgatgattataaccgaacagtttatcaaacacctattctacttgctgaaatagaatcacacgattaaaaacatttttttactattctggctccggtgttcttcttgttggtaaacggtaatagcttctttttatcagttaagtctttccggtttattattttccttttactcttttattataataacaagacttataggacaaaattagggtatgccagtttcccagcataccctactaaaattttgcatacataattcgattaagtattttatattgcacaaaccccataaaaagtgttagtagcatctaactgttctggagatgaccaattaagcccatcatccgaggttgtaatatatccaccaccgtcataagttccgcatcccactacgatttttaaagccacccgcaactcaagcgggtggttatcatcttcctatataacagtccggttacctttatagaccatgttctgccgaacctctgttaccaattcacagcctcttttaccgattctatattacctgttctaattgtattacattctcacagtcccgacatgcaccattgtttgtttcgtgcgcaaaggtacggtggcaaacgatgttcaagtaccgctgttgctacctgaaatgaaatttgacgtaaccttccgcaatcacagattccggtattcataaaatttcattccggttacttgctcatagttcttgcatccaccgttgaaaatgcacatgaaacaacctcttgggtaaagtcggaaggcttcaagaagagggaaataaaaaacaacttaaaaaaataaatgcaatgagaactaaaacactctacagatgcgatgcacagaaaatagacatcagtcgtttccctaactttcacataacaggaagtataaccggaatgaagaaactctattatggcaagaatgctctattggtacgttgcggaagttggatttacaacgtgtcaagtgaacccgaagtttattataatatagcacattagtagtatgaaaaaaggttataaaaaagattttcagagttggaaaggtatagtaactctaaaattactttgctgcaatatagcagcaggtcgttttgattggaagaaatattgtacgccacagccttattgtggtcaggagatttgcgttataccgctacattgttcttatggacagataggctacactgtgtatttcccttattctgatatgccggaagtggaatacgattgggaaatgaacaaattaactattgacaaagagaattgggagaattatttacagaattaatattaaaaatatggcacagaatttttataccaaatggcagaacgcaatccttgcagatgcaggagtctatgtttcaaaaaaataccgcagtttccaaacggccttagtacgtgagatttccaagtacgcaacagccgttggcgcaaaagtaacattcaacttaaaggggcattataatacctcttgtttcatagaacgtaacggtaaattcgtttacatcagtcactcttccggtttgtcccgaatgggtagcggtgtaaaaatagaactcgattctttcttaatccggacagcccaacacgcgaaagattacagagggggacataatcagtattgcgatataacaaatttacagtctatgatagataatttgttagagtaataaaataaattcaagaaaaggtacggagcaaacagctccgcatctttttccgttttatcggcgcattccgccgctgtactctgcttcttgtagctcttcccggtattcctccatattattcagcttttcgttcacggtttgcaggttggcatccaacgaagcattatggtcgtatgggaaacgatgttgtgcgacaagtcccgcattagtaaccggcccgatatctatcatgtcggattctttattatagctgacatacagcacatcaccattcggcatttcaaatgcaggaatcttttgttgtgtcatgatagcgaattgttccgcagccatctccttggctaccccttttaacgtatctccagcatgtttgataccataacgcctgatatggtcgcgtacttccttttccgtgaatttcagcatcacttcataagttcctccgacactcccattgtacaccacagcaaaatccttgtcctcaatcaaaagattgtctcctcggttctgtatgggagaagaataagtatattcttcgttaatgccgttaccgtcataatactccttggcgagagtcagcagtccttcgtagtcccccttatccttgaatgcgtccaaccgcatcgtgtcatcggtaagctgaagataggccacggaagaataatacactttttctttcggtgctactgtttgctcttcatcaatgttctgcttcaattccagtgcaatcttatccaccttttgggtaatcagagaagccgctcttttcacatccaacagagttgtcttgatgaattgtggcgattccttcaattcgtcgagccatcctttgaggtaggcacaactgtcctcttttatatgtttcgtcatgccgtaacgttgggcaaccaatgcgctacctaactcggctaccaattcttcgcgcgcatactctgccgagccgaaagttgtcggcttgatacggtcgagaactccttccgcaccggtcgagtgtgtcatctcatggaatagtgttccatagaacgcctctccagatttgaactgttccttttccggcacaacgatttcatttctcgatatagagtagtaagcgttatcctgatgctgtggtttgatcggacaaatccacagattgtcctttatcagcgcatcgacgggagcgaagctgaaatactctccgttctcaatcttcggtagcgaatactccttttcgagtttttgccacagctccggtcttgcctcctgcaagttggtctgtaggctcggtatgcagcgccttaccgccttacggcggcaggtttccgcatacctgcccctaaaccgtacgtacacgtctccgtgtatacggcttgccattagtaagctcacattatttcccatgaaactgaattatagcattacaagattcacacactacaagcgtcttacgatgtctcgacaacatcaacttgccccatggagtttctccctttaccccaacaagagtgcgtatatgatgcattacgacgttagtgtcagttgcaccacacatttcacaggtttgctgtttcaacctttctgcaaggcttggtttgggaacatacatagtgcatggggtacggtcgagaaaatcgtccgttaatgagcttttacgtttgaatccctctttatagagtgttctgaaccgttctttgccttttgcatccttatatgggatgacaaaattcttgcctttacggtacttgtctctgatttgccctacatgtcttcttaatttttgaccaagagtcatataaagactatactccataatgtagccgaaatcggcacatgttgacgaaacattgttggctatacagtaatagttgtagaagcctttgatttccaagttgaattgtgcaaggatgtcttcgggtttcataccgaccattttctcccgtgattttggcttccatacatctttgccgtttacgttcgtaaactttacagcatcgtagctaagaagcttctttttcactgtttcagaagagagcataagcatgacctttccaacaaattctcgctttttgattcctttgctgttccttttaaacacatccaatgtcctaacggtgatgtcaaaaccgaggaatttagcgttctcttttgcgtgagttatgagtgtcttctcagcagaaagttcgagtttaaggttgttcatcatatattctgtgatgtctgccttgattcgttcacaatctgcttttgaccctataactccaatcagaaaatcgtctgcgtacctcacgtatttcaatctccgataattctcatccattggaagtctgtatgtcatcttatttttctcttcgtgcatggcttttattttcatcaacagttctgcttttacagtttcatctgtttccgctttccatttcttccttaggtttactgttttcgtgttgagacaacagtattctttgttgtgagccctttctttccctttgtcgaagtgtgaaatatactctttcatgtacttgtcgaacctgtcaagatagatgtttgccaaaataggactgattattccaccttgaggagttcccgaatacgtgttgttgtacttccagtcttcgatgtaccccgctttgagaaactttctgataagacgaagaaacctttcatctgcaatacgctcttgcataatgctgacgagtacatcgtggtctatgttatcgaagaagccttttatgtctccctcaataaaccactttgcacctgtaaaagtcctttgaatgcttgtcagagctgtgtggcagctcttatgaggtctgaaaccatgagaggtgctttcaaagtgcccctcatagatggcttcaagaatcatccgaactacctcttgcacaagcttgtcctctacggatggtataccaagagggcgtttcttgccgttcttctttggtatatacacccttttagcaggatgcggcttgtaggattcattcctaagtgtttcgatgagacgttcaattcttccaatgctcatttggtcgatagtctgaccatctgtgcctggagtcatattgcctggcttcgcatatatgcgctgataggcaatgaagaacatctctttgttgaacagaatgcggtacagtcgctcaaacttatagtccgagaccttactgtgctggcataatgtgtttaatacaatctctggatttctcataacgaatctctcgttttcttttgtttgtattaaagttactaactactccccttcgccatgtacaaggttttcccttgctcagactactacgggagttccgttaccttgtcggatattcagaggcaaatcctcatagccttacggcgttccgatttaggtaatctccgtttaaccacgtaataacgtctatctttcgataggcaacagattgtcggatgcgactttcgttcttttctccacttactgcggtcgtgtcatggcttgttcttgctacttgccctcgcgcaatgggctgtagtaccatgatgtggcgtatataactgcctttcgccacaacttcaacttctgtcactgaactatcattcaaccaatcaggcttcatcctcatatctgtctttccccttgcaattcagtcgtagcatggcaattagctaacttatcgctttactgacgtgctgtgttcctctttgagtttcctctccgagtaagtcagtcggggataggtctattgtttatttctaaactttgaacactaacctaatctcttattatcgagatatttattacgcgaccattacggacgcacgtgccacgttaaagactcggaatacctgcatcttaggataaacattgtattccttcttctcgttatcagatagttttttgtagtcatcatacttaatcttctcaccagaatccttgtgtatgcaggtgaatgtagtcagcatgattgggaatgatttttctccacgaagtacagaaacacgaggtttctcctgattgtccttatcggatttgttgagccgttgtacacactcaaaagtgcagaagcgcggaatcttgtaaccttccttttcacaatgtataagcaacataatggcattcatgccattatactcgcgtccggaaagattgcagggccattgtaacgcttcttccgtgaaccatggctttctccaatccttacggatactctcgattttctcaatcatcatttcagcgaagaggtctaatgctttatcttcgctgttcggcccgtccgtgtgctgttttttatatccggccatatcctttactgattggaattagacgaatctgctacatactgtacaagttcttccaccttgcatgaaacattcagctttccgttatatgccgaaagggatatttcacctttggcatccactcgcacgcccggctgtaaccatgcttcgcgttctttgccaaaacagaaaaaacgtacccattggtattcaaagccatcctctactttctccgtactgaatgccgaaaacattgtgtaaggctggtctttcttatcccttttttcctcgatatgctgcccgaccttacctcgaaatactaattcgcccttgaccgtatctttcgcatctgccgtagctgtacgaatttcgttaataaaaagattgaaataaagtttgtcaccacggtgtttgagatacattgtccccgaaacctcgatgcgggaaccatttcgatatttggaaacctcctttccggcagtatctttgctgacatccacctcaataggcatagtcttcccgtcagtgtcagggatcattactcgaagaggaaaaaccaggaacgttttcccttccttattggtgcgtatcgacgcatcacgtccgataacgccacataccgtaacattacattttatcatttctattgtcttttaatgtgatacataatcacccgacaactgtgttgccatgatttgttgttgaactgctaaatcattgctcttaatcgggtgctcgtatcattgcccagatcagccatccggcaaggaacagttgaacgctcacgataatgagcgttgctacccagccgaagagttggtagcagagcaggacatacaaggcaaggtaggatagtccgaacagacatctgcatagctgtatcatcacgcattttaccatatcgccacgcttctatctttttaggttctctgtctgtccctgctgttgggacatcccttgttcaaaattctgtgaagccgcttccgagaggataaccgtattcagcataccggttacacgtatccttttggcttcttctgtgagagtattgttattcagtgttgccgacagacggcttaactccgcagtagtcaactcacgtgacatgcgcagttctccattgttcactcgcagaatagcctttccattttcactgattgccagttcgcagtttttcatgcccggtaataatgatttcagattgatgcgtccactatccatttgtttggatatggcagtcttttgctcctcctcgttcttgttgtcgatttgtacggccaatagcataagggaactaaaggctgtcatcgccatctctactatagggtcattgcatcctgacattcccacaccgctatcctctgacgaaagcaacttcttcatccatccgtcgggcgaaaggtttttgccggcggcattctcttctgttcctttatatcgggtgagcaggctgttcccgttgtgcaacacttccaatttgatattacctttctgtgcgatttcagtcagataagccgcagggtcgatgtcacgctttgttccgtctgcatagaagtttgtcacgccgaaatgtagatgttcgcccgttgtacgtgtacctgtgttgcccgatgtgccgagcttcccaccggcttgtactacatcaccgacctttacagtaacctccttaaggtgcatataagtacattgtaccttgctgccatccgttctggtatattccacagtcagcgattttccaccgggcgtgttcttattctgattcacagccaccaccttcccgttgttctcagtagccagtaccgcatcgccattgcaacggatatcaattcccttgtgcatctgttgtttcgtgttgtccatcggatcttgccgcataccgaaaggcgaggtaacaaaaagaaactcttcacgctctaccgggaatgagtacttcgcaccatactctgaattttcagacgttcggagaggattatgttccgtaccgaaccgcttaccctgtgtctccatttcctgcatcaccagtttgtcatactgctgtaagccattttgctctataatccgttgcagactctcggcatattctccgcctgtggcataaccggcctgttcgatattttgtgtccaacccttgtaatcgtcgggcgaaagtgcaaaacattgggcatagcggctgttttcttttaaaaaacgggagtggtgttcgtatgaatcacccacactgtcataactgcaaaacttctcattcggcttatcgtcagtatatataccataccttcctccttcggcaatccatgcaggcgtagccttgatgccaaaatgattgttctcgttctgcgccaaacggctttgcccgttggaactttccagtatgccttgtgccaacgtcacggatgcggggattccgtaccggcgcatctgctccatagcatactctgcatatttcattgcgtatagttggttcttgctcatttctttactccttatctatgaaaacctctgtgtgtttcttgttcctccatgtcacttatagcaacccgtgccccggcacggacgagcttagacagatagctgtcgagctgctccgttgaaaattccgttgaagccgtaatgtccccttctggatactcttttagggttatgcccaatatctttgcaccctgtaccgcatcttcgttatagagccgataaccatctttcgtgcgaagcagttgcaaggcatcgggatgattcgctttaagtttgtcccacaactgccgttccggtgaaatacccttgttgtctgattccgtccgttcctgcgctaccgtttctatcggccacaactctgcttctttctgttgtttctctccggtgtgtgcctcctgcgattgtcctttttgtagtacgtctgcgaataaggtagctgccaaatgacgtttgtagctgtcacgctcttccgctatccacatccgctgccactgttgcggagtgacacttcgggcaggctgtttctgcccatcaatagttgcgacgcattgtatgccgtcttgtttggttttgaaaaccgaaacacgctggatacggttcaagtctatttccggcatttcgctgctgaacaaatccaccttcaggtcaggtttgacctcggccagcgcataatacttgtgcgccagttccatccgaaccttaccgatgttatccatcgcttgcttgagtgttgaaaagaagcggtttatatcttctttatcaggatagatgctatatccgctcttattttcgggtttgatataaagtgcccatcgtttcttatcatcttgaatcatctctacgtggtcaaatccgatctcattcgcctgtttgaccgctgacgccacgtccagtgtggagagcttctccattgcccaattcttcagccgggccagcataatcatcttctcggcaaaataactgtcatcgggtcgataacctaatgcaccatccgtattgtagaagcgtacctgctcgattccatctttctgcaacgctcgcatgatacgtcccttgttcattcccggtatctcgttatctacctctgtagaagcccctgctggaagaattacatctgcggtttttgcctgtggatcaataacaagcacaatttttttcgtttctttatccggatgctgccgaatctcgttcgacacaaaataatgtttgggcatttgctcctgcatggttgaagtgtctcgccggttgcgcatggtggcgtattcgattttctcgccccgttccgctttattgattacttcgatggcattgttcacgtcactttcgagagcgtccatcaagttcgggttctctttcagttcccggcaccagtattccactgtcttcagactttcttcagacaaccgtgctggcaaccccagttccaacattttaatccctgaagccagttccactaccaaccgttcctgtctgacagcatcctccgaaggagccacaccgttcttcatcaccataccttcacgcgctaaccgttgttggtgtccggtagcactcacgatttgccgcaaggcttcctgtatatagtcgtgataatgtctgaactctctttgtcgcggcatatagaccgcatccttatctgtttcgtagtggggtacaccgcttccatccaaacgaacaggcacaaggttgtctcgcatcctcagtaggaagtcgttgaattgaatatgcaaccgtcggttgtcagcttccgtatatcctctttccactgcacttccataccgccgcaacgtcgtttcgtatcgctccttatccacgtagggtagtgtcgtctggtcaatgttgaacaaagtgcgaatttcacggttatgtacacctttatataatttttgttcctcttcatacagtttcatgtagtcatcacgactgataacctgttctggattattgcggtgaacgtacttgttccaattataaaacaaaaatggaacgccttgctcattctcacgcaccgaggctccttgtgccttggcatcgctgaatagcgtgaactggttggttttgcatccatttttatcagaatgcagcgtcatgaatagtgcattgaatgcgctgacagaaacaccctttggatagaggcgcgggtatccctttcctgatgcgttgagccagtgtccaccggcattcgaggcttcactcaaagccgtagaaagcaaggtgatttgtttttcctcggctttcttttcgatttgcgatttttctttcatatcgtttatttgattataggattattgaataccccgtgggcgcacgatggtttccagttttccgtcctcataattccgtgcggcagcctggcgaagctggtcgttcttggcaaggacagcatttgccagcgtgttcaaaggcaatgccccggtacggtaggcttctgctacaatcggtgacaactggatggtacacggtactcggtctatcgtggcaatcaacgtactatcttgcaatacagggtttactatacgtgggttcagagtttcatttgtatagcgtcggtactgcacattgttctcatttgttacgttcagttttccctctgttcgttctttcaaggcttcgtgtcctgccttattcaacaagttcatacctcccaggcctatcaggagcattttcagcaacgggttacgcacaaacatacccgccacaatgctcgctatcggtaacatattgtcttccaaatgcaatgattctgtcttgcctgtgaatattcccagtagaacatcagggagcatggccattacataaccgagattgcctgtgatattacctatgccatccagtcccagcataccaagcagtccgccccaaccgtttccgtttccctgtgctacttgcgcactttgtatcgtttgtacatgttgttccgcatcattggcaggaacaacagtttcatgcttctcttctttcataatttcatcctgttctgtcctgaccattttcgctttgtcacgttgttccaaagactgcaagtaggcttcttcctgtccgggagcaacaacaatcggcacatccttgtaccgttcctcatgtttctgttcttccttgctctgtacattcggccacaataaaccgctattctggttttgtgtccattccatgaagccaaagtccatgacagggattttctttttcagttgcttgttgtctgtaccaatcgccgtgttctctttgatttgtatttgggctgcctctttgcgaaaatcgtcgaatacgtttctgtctctgccgaacactcctttactgatgcactgttctactgaaagggtatcaggcttcttgccttcaaaatgattggtgatggctgcaatagccacatctgcaccggtaaactttgccagtgccgtccatgagccagtaccacccatcatcagggtatctgcggctgtgcccaacatccatcccgtacctttttcccatctgttcgggcggtaagctgcttcgcctcgtgcctctatttcatcggtcagcggtgaacggcttaacgtctgcgataatcccagcagactcgattcggcagcctttcggatgatgtagtcagcggaagacttgggcatacgttctttcaccaaccggtcaatcatcagttcctctatccggtggtccatataggcataggcgaggtcacaaccgagcagttctgacaactcattgtaacgtgcccttccgatttcctgcacgacggtatcccgccactgcccggccatatacgcaaggtcttgctgcatttcctcggaaccggtaatctccgtcttgcacatctcgatatagtcctctgttgttttggagttccattcgcctgtgaccttgagtgcttgataggggtcgctcattggttgtgccgaagatgccatcatactgagaataccacctaaagaggtggaatattctttcatttcctctccctgattccgtatgaggtcagtccgcgtttttgacatgatgggtgcgatatggcagttgaaatagtcgttcacgaggcgttccatttctgcaaaccgtccgctatgcttgattccgtccatagtgtattatatgtttatcctattctattcattaataattgctcttttgtctgctcgatggcgttgtggtaaatttccatctgtttgggataaaactcttccagccatacatccttctcgatgttgtcgtgaatgaagcgtatcgcttgttctcgctcaatctccaccgatgcttcgccctcttcccggttattgaaccatgctttcgtccaccagcgcacaccggcccggtcaggatataccgtgactgctctcggtatgtcaaagctctggatgtctatgtctaattctgccagtgggtcaatgataccactatgggtcagggcttcgtcgtagagtttttttttacatcatcgcccatcgtcgataagtacacgccatgccgtagggcaaggtaatgcaggaagtccgcaatgagtaggttctgcaccttacaagcaagcggcattgctttatgtcccagtccgagtgggttggatatacttggcatattttcatagaaatattctttgactgctcccattgtaaagacatggcggagtgactgctccgtatgtggaggaagtcggtatgcaccacgctgtaagtcttccatgtagtagggcaggaaacgtagcatcaattcctctatttcctgtctgtcctgctcgtaatcggtggtcagtgccatctccatgttgggagatgttgccgcttcgcctccatcagcatgacacaatgcttggatattcccatacagcatggttagaaattccagcggattcagttcctcacccttgaagcgtatcccgatatgcagcttgtcaccgcttaaagctacagtctgtccggccttgacacgctgtccgaactgggcgaagacatttgacaaatgcccataggtcacttcatactccccatagcgtatagtttggcagatgccgagtatagggtcattgcctatacctgacacgataccgctggcgacagccgccagcgtgtagcaccgtacatcgaagtcgatgccatgatgaaaatatgtttttcccgttgtcggatcggtttgttcgccgtagccgagcgatagtttcacatccttgcccttccgttcttcaaaaggcatacagtatccactttcggattgcaggatcatttcttctgtatatttcattatgtgattatatttgattcgtattcttattcttatcttttcatccctccgctattcgtctgttcttcaacgggaagagcgggtgtctgtattcgttgtatgcttctcgtatcaggtgtgcggaaaataccggcattgttgccgataagcatcatgccgagaaatgcaccggcaatcttgcccagccagccgaagcgtccgaatataagaaatgctgctgcgaccagtcccgctatactcaatcccgacacgttaccctgtccgagattacggaaaaagttaccgaacatatcggaaactccgccattggagacttgccgtagaaaattcgatactccacccagttttgagtctatgccggctaccgtaccgctgacggaaccgactgcttctccggctttgcttgtcagttctcgcacaccgtccgctgcatctgcaagggtatccgtagccgatttccctatgaccgcatcgcttacgatatgtaccacgctcttatctgtggttagtttctcccaacccacataaccgactgcaccgccgatggctgcggtcttgacggcttgtcctgtgccccgtaaggtttgtgaaggatgcagtgcagcatgtcccatacttcttccggtagcttttgctgctttgccgccatattttaatattgaatcccaaattcccatatcattacatttttaaggtcttacattctttccaatctgtcgccaacgtcgcttggctgcgtccacgatactacgtttatcggcttcgggatgtgcaccctcgtcgatttcccgccaaatgtcgcccattgtcgtgtactttaccgctttggtcagtcgttgcagctttgtgttcattgttttgagctttggacggatgccaaagacaatttccatacgctctttttccgtcatcttgttctccgaaaggcacgctgtgcgtatatcgttcacaatttccacgctgttcatcatcagttccctataaatcttgttgcgctgtgtggatagggctacggcaagcgtattggctggacttcgcttcaattgtttggtgaagtcgcccatattgtctgtcagcctcgatacctcataatagaacccataagtttgcgccgcatagcagactattgaccggaaagagtttagataattattaaactctcgttgcaggtctgttgtcgcctgcacttcttcttttgtccaaatatgtccggtggtctgcatcagcatgaccttttcctgattcttcagctccttctctgccttttcggtatatactgcaatcattccggccagtacagggtcattctgcgcttgtacctcaccgataccggtaagacacagcagtaatatacttatccaaattgtccatttcataactgatatattttatcggacgagagctgccgccctgtgccaatgggacagagccatacgagctgcctcaccgttgtcacggtcaagcattcctgccgttacgttgttccacacatcattgaaagtatagtaccgtatgctcaaatagagcagatgcaacttccggctaaaatccgatagttggtcgttcaacgcccatagcgtcttgctgcgttctgcccccgtaagcatgttttcgttgctacctttggccacagcgtcattcagcaatgtaaaaacagagacaagttccgttgctgtttctatatagaggttgttcatgttcatactggccacaatgccctgcggattgttttggatggccctgcctaattttcccagcgtgaggaaaatccgcacaccgtcattgtagagatgcgtacaggctttcagtgatgaagcgtaaccgcttgctgtcttgaggtaactgttgtactgcttctcccacttgtggatttggttgaactcggtagcgatgctgttttggagcaaggctgtttgtgtctgtccctttatttgtttttcaatctgcccgtttatcagttcgttaccttcggccaatgcagtccattccaacggattggaagccgcaatttgggcttctgccacctgtggaagcaggcataccagcgaggcaaccagccccagactaatgattcgtgatttcatatattcccttttttcgtttgttagtttctacccgttcacggataattgacacgaggtcgtccctatggaagataccgatcaggtcaagacggggcgtgtttctgtccattgaaaggatacgtacggttttcagcccacaaaattgttgcagcaggctttggtgctcttgaaaatccacgatacgatatagctccatataatccactttgcgacggataataccgtattcactgacaagttgttccgtgccgatgcaataacggattcgccgcaggtagagataacggtagagtaacagtaacgagagtatcaaggcaattactgtggcaatagctgtcaatggcagcccttccatgcctccgtacacccatacagtgccgcacagcacgagagtgggcagctcgttgatgacaaattgcccggtatgtggatggatgacaatggttttgtgacaagttctctgcataggttttatggattatcggtgaaaacgggaatgaaagtcttctctcattccggaaagagaattggttatatccacttccaaccgggcaagttcttcccgtatcttgtacatttcctgaaaacccttatctgacattccctggtcattggtttcaaaggagaatattactctgtccgcacgttcaagacgctttcgcacagcctcatggtctgcttcgtcgtataatccgtttcggatatgttccggattgacttcgggcaaatcggacaaggcatgattcagcgtggctttaccgctgatttcccaatcgtcaaggttgtccttctctggttttatccgtttgccgagtagctggtcgttccaatccttataaccctctgcggcagattcatacaagatgcatcctgtagcttccggaccggaaatggaagcatcaatcgctttttcgatggcttccagattgcttctcattttctctaattcttcctcactggcagaaccttcgtcacgagccatttcgtactcatccatacaaaccattctcatttcctgtagatagccgtcaccaattcccatgtcgtcacgctccccattcttcaaattttgttttgcatcatttatacccagtatggctgtaatcttttcaaaattgaatggttcaagttctatttcatactgtgaatagtcttcgctgttgttctgtacaatcagtctgccggtttgtgacagacaggtggagaagttccagcctgcatgagtgagagcaaagtggatagcatagacttgtccggcacggtcatgatcgaagcaaagatgatgtgaggcatggggagttgcttttatcgctcctttgaattgctgctggctcggtgcccctccggtagagatgaataccgcctttcgcagatccttgttctgtgcctgatgaagttggtaatatgccatcgcatcataagcactttcgaaccaatagatatgtttggcggaggtgagagaagtgcgggcagggctggcaatccacagtccctcgcttgaattgctccctgcggctttgcctttgtagctgccgctcccgtccatacgggcacgtcctcgttcttcaagtcccacaatcgctccgtcgcctttgggcagggttagtggaaaggacaggttcgtgtaggtcgcaccgtcctcccgatgtttcgtagccagataaaaatgccgatggaaggcatattgtgtataaaggtcgatacctcggcttttaaaataaggataaaattttttctgcgtttcccgattctgcggattgaacttatgaatgtcgtaatccgctatgtcaaatggctttacatctcgtttagggttcactattcgggttttccgttcagtgacaggaatgttcagtaatctgttacagacaagattcaccagtctgtctggagacatacccgcatggtactccgtgaaaaagtgcggatgctccttgatgaaggaaatgatgttataaactttctgttgttgtgcgtggaaacagcattttccttgttgtgtcacaataaatttgtcaccacggatacgtctgccgtcgctgtccaaacgaacatacgagggatagcgcagaccgtcacgacggttcaggtgataccctgcgtcaatcaatacgtcctggatgtttagtcgttgcagaaagtcatcgtatgtaaggtctccgtctctcataggtttacctccctcttctcatttcattaatatcttgattcatctgtgcctcgaaattacggatggccacatctctcggtgtatctacgccgggcttgaagtatggatgtggcggtccgctgaaacgttcgccatagaactccggagagtggtggtgatggaagccatgtgcgacttccgatgccaccacagcaccggcggtaagggcagcgaatatcttcacgccaagccccttgttcgcttcaggacgtgtcttcatatccacctcgttgaaaatcttcgaaaaaagtttcatccggtggtaatcatccacagcaagaaacttgtcgtagtctttctggctgatttcgtggctgatgacctgtccgtcaataacagcggacatcttgtatttaccctccgtctgtgccggttgcacggcaatgtcactgacctctacttcccggccatgtttctcctcacgataccagcctttgctttcgttgagtagttgcaggtcacgaccgtccacggctgcaccgatactgccctgtatgtattcctgccgcatcggagtttcttgctgcatgaataattcttgttcctgccgctgccgttcttccagttcatgccgcacttcgggatgcaggccgatactgatgcgttgttcgctgttgagctgttccatcgttactttatcggcaaagtccgctccgataatgccgttcagcagatccagccgtttctctacaggttgttcctcgatggatgcggtagccagttttttcacttcttcttccgtcaggtcatagaccatatcgacattgacactttccgattgtacggtcagtgtcctccgttccatatccacgataagaccgtgcgaagtaaggcactccgaccatttctcgttggaaaaatagactggtgaagcaatcaactccttgtatgcttgtgccggttccttgctgcgcggacggctgacaagcggtgtaatgacctcctgcaagttcttcaatacatcttgctgtacaatgggttgctcctgttgaccgcctttgtagtaaaagccgtagccacccgattgcagttcgccgggcttcatgcgcccgtctgggcgttcgggtacgatggatggccccggaaagaaaagctgcccaccaactctgcgtaggtggaaaccccactgttcgcgtggtgtccaaccaaggaatggagggggcatacccagtcgccccatgtgtccgtactcaccaataccgatgcggtagccatgtagccccatcgccacgcgaccgttggcattacgggcatggacgaaatttttcggcatatagaaatcttttcctatgatactcgtgagtatgttgtaggctttcttgttggccgtattcgttccccagtccgtcagagccaacatctgtcgttctgttataggatagaccaataacggtgaatcatgcccttgcacaatcagccggtagccgcctccgtcaaatgcgacatgggcttgaagtccgttacgcatcagtagattgcgcatttcgggttgcaagtccatctgccgaggattagtgtttgttcgtatcgtcatagtctgatgttatgatggttacttgttatgcgttgccgtatttcatagccgcttccaattgttcgtctttgaaacggacaaacccggcggcagaatcttcgcagaccgtgagtcctttttcctcacagtaatgggcgtactcctcctgccactcggcagaaaaatgattgatgtaatcgagccagccgtattcgctgctctgcatcttctcgacgagaatctcttcgggataatatttctgttgtgccatacgcttatattaaataggttttatttgtgaatacctgccattcggttacgctcaccgcttttcttctgttcgttccacagttcttcggtgtattcctcctctggaacgtagtcgagattgccgtcatcatccatcacccagcaaccgtagcaaccgaaggtgtacttatcccattcacgcttgggttgttctttccatttctgcgcgtcacctgcgcagaaacggatgcccgtcttgttgtgaaggtcgatgcctaccgtgacaggttcaccatccactgccaccgtcagaggctcaccatgctgcattccgtttacttctactgtacctaagtgcattacctctgccagcactttcaggttacgggcgatgatgggtgtcggaacatacatcacctgttttgtttcctcgtcgatttgcacgaaagctttactgcgtcgtccgtccgccatagccacgtctgcaatgatggatttgccgtcaagcaactgtttttgctgctcctcgttgtagcattccagtggtgacgactttagtgtgggataaaagaccacatccacctcgccgctatccatacggataaaggcaaaccgactgcgactctcgattacttcgccattctcgttagtgacacgcatgggcagtaccggcgagtagccgcctttcccgatttctttcaggatacacaggggcaaatcttcaatcatttcttgggtaagcccaaagcgggccaatgtcggataaggcagttcgttgaactcaaattgttcttttttcatattctgaacgatgttataaaattatactcagcaaatatagagcgatttcttatctgatgactaaaacatttctttataagtgattataaagtggtatttttaatgttttgaatatgatttttcgcaaataatcatattcaaaattgattaaatagttatatttggagaaaaaacagtcggcaatggacagaccataagaagagcgtgctaactttgctgccatgagaaagattttattattgatgatgacgggtgtctcattatgtatcacgccagccaaagcacaattcaataccgttgccgttaccccaacacgctacaagatggaggtattggatatggggttagaccaagcggaaccggcatccgaaagcgagatttccgtacaggaagtttcaacaggtatcccggtatccgcagatatggataagaaaaagtggatggatcgttacttgagtgtaagttacccgttacgttatatcaaggtcacttcgccttatggctaccgtaaggacccgtttacgggaaagagtaaatttcatggcggactggacttgcgcgcacgtggcgacaaggtgatggccatgatggagggtgtggtcgtgaaggtcggacaggacaagacttccggcaagtatgtaaccttgcggcatggtaggtacaccgtcagttattgtcatctctctaaaattcttatcgtcaaaggggcaatagttcatcctcgtgatgtggttggcattaccggctccacaggacgcagcactggcgaacacctgcatatcacctgcaaactcaatggcaggagtatcagcccctcgcttatattcgattatatccaatccatccggcaggagtgtatatcagcattggcaggtttgtaaaagagaagtgaaaagggctgaaaacgttccggttactttgtcatccgttcaataatatgggcaatatggttgccccagacgtgtatttgtacaaggagcatcgaaggcatggagagcgtcttgccatagaagatagccgccactactttgccaccgcaccgttctatctcttccttgtaatccaccacgctttgcccggttgtcagcacatcatctatgatgataatctctttccctttgatttttccggtaatgaggtagtttcgttcgaggatacgcttctctccacctttggcctcatgcaggctttctcgtgcatcgcaaatatcaacgtcgtacagtcctgaagttaaatcctgtcggtgctttccgatgtaccagtcgagccgtttgaaccgttgaccgtattttatccagttgctacacggcatgaacattatatggtaaggtctctttttcagttgcaaggcattcatacacgttttaaagaactcgattccgtgtatatctccttgtttgaactggtagatggaatggcagaaagccttctgttcatcattgagcagcgcattgtatcgtgacggataataatatccgtaaaaggagattcggatgcctcgtaacttgaacggcttatggggagaatggccatcaaaccgttcgggatgcaagagacagaacatacggcaggctttccgatgaccggccattaccgccagacggcagtaacgttcacgttcctcgctcttttcggtcaaccgtgcggcggcgaatgccgcttctcctgcttttcgtcgccagtagccgataatataccacaatgccccaattgtgaaaagcaggagtatgaacaatagtcttgcattcatcgtatttttatttgaatgaagcagcccgtttcaatctggttatttacaacattacggtgtatttcgacataatcggatatgggggttgtggcttcattatttatatcaaattcgttttcactcacttgcaaagttagcaaaatcgtggcactaatctaaaatagcaccgataatttataagccatatcacttttatatcataaagtcttacccatacaatttcctcttttaattgtacatgctcaacttttatagaagatgttcgccctgaccggtacacggcaaatggcatacaagtctgctatatgctgtgtacccgtctttggggcaaagcaaggacgatggcacatttgccacaagtgtcaatcaagccaatctgttgtccttgcagcgacctctgctatctgttcttttgtaaccggcaatgccgtctgtttgtttttatagcttcgccccacaccatcagcggagcgtcacaggacttgtccgcaagagacattcactcaccttatggcagcagagctgctatggggtgagtgaaagactctttacggaagccaaacatgaaaagaccgtacacctcggtcacaaactgccaaggcttacgcttcgccagatttgagactaagttgtacggtcacttcatcgggaagtttggaccggcaagccacagacgctccactgcccacccattccttttataaatcttgcacctattctacatgtctatatgacaaccgcctgtagtaagaaagcatattctgtttgtcggttagctctgctgtagtcatattttccgcaaagtaagccgccttttaccaaacatcaaatcgccactatcgctggaacgaaaaatcttcctctgacacgtcagagcgtatttcttgtccccgttttgtcttatcggtattcttgggcggcagttgatggcagaaaatatccctcagcaggctgaacagccttcaaaaagagggaaaaagaaaaattatcagagttatggcaaagacgatagacatagaacttcaaaaacagttggacaagccacaggcatggttctgtaagtattttcctgcacgcatacgcaatgtgagtgagcgtgagatagcagaccgcaagttagtctttgatttcaaggatggacgggcatacgaagaggttgctcaacgcacggcagccaacatgaccgaacgttatggaacatcatgtactaacattgtattttctcccgtaccggcatccaccgataagaagaacgagatacgttacaaagcattctgccaaagagtatgcgaactgacgggagctatcaatggttatgactatgtatcagtgagtggtgagaggctaaccattcacgaaaaccgtaaggcagagaaagaagtccgtaaggtaaacgtcattgagtttgattcggcttttttcaacggcaggtctgtggtagtctttgatgatgtgataaccaaagggctgagttatgctacctatgccaatcagcttgaaagccttggtgctaatgtactcggaggtatattcctcgcaagaacccattacaaagtgaaataatatgacccagacaaagtatgataaggcagtgtccgtttgcttcagtggacaccgcaatattccattcctatacaggaagcaactgaagctgcaattaaaggcagcgataaccaaggcatacgctggaggttatcgtcatttttactgtggttgtgccatggggtttgatatgctggcggcagaagttgctcttgcgttgcagtccgaattgtcaggtctgcaagttattgccgtagtaccgtatcgcggacaatccgagcggtggaacgatgcgatgaaagcccggtatgatactattctctgtaactcggatgatgttatcatcctgagcgaacactactaccatggctgtttgcttcgacgcaacgactatatggtttttcacagttcgtctcttattgcctagtatgacggcaaccccaagggtggtacgttttatacttatcgtaaggctacagcgaatggactaaaagttctaaatctctatggcagctcaatcgtataacagccatcttgttttcgcatattccgagccgtagcgttaactcctttgccattcatgtaaaggctgttttgtcagccatagcgtgatatggcaaagtacgctattagttctgatgtattgcccggctttacctatgtgccgatttagttggtgttgctgtatttttatatcttcggaggctccatcctccttatatctttctctaccttttttagtattcggcttaaaaagtaatatacttgccttacttttcgcctatttagcatgtttagggcacgtcttttataataaaagtgcagcaattggttgctgcacttttgctataatatctatttgtcatattagaccttcccgtacaccgtcctcatttttccgtccaccagcaccttatttgaccgcacaatccaagctctgccgtcattcaatccgcattccaatgccttttcgccgccgccgattagtaccggaacggttgtcactgtgatttcgtccgccagcccgttatccaagagtaaagccccgatttcctcaccgtaagccaccaccataccgtcgccgtcttccttcatctgtctcagttctgccactgcatctccttggataaacttcactcgttcattctccgtcaggtcgatgccgccgttcgtcacaaccaaagtctctttcgccgtaatcggccaacccaaatggttcatataaatacgcaggtaagtttcttcgtcaatcagcacacaactggaggcatccacagccgcatcaaaatgcttgtccgaaggagccggacaaccgtcgatggactggtacacgtgcaaggaaatctgtttcatattcaatgtgtttttaagaattatgtccaccttgcaccctaaaggacagcatgaacccacgctattccggaatagaggtactgccatacctaaaaggcagataagcaaacccttgctgtataaacatacagtatgaatattttgctatacatcttgtctttttgataagtgtcagttttctattccaagacgttcagtgaacgtataaatatatatatcaatctccgcctgtttccaagctgagtatgaatcttccatgtcacgacaatgaccgtacccgaaagtaccgtctgctgtcttcattttgacaaagataacgaaagattggcggataagcaaacaaaaaacattgtttttctggttgcctgttccgaactgcattctgccttatcaaaaagacttactcattccccatgatttaatacagtcgtcattctgcaattatcaagagatgggccaatccatccgattccacctccctttatagttcaccttcctccgatatagtacgggcaatccgttccggttgtccgttaccctgttttaacacccctgttttacagttttattcatccctttctatttgattgtcatttattatcgttttgctgctgccgtgcgacctctcgtggacttattttcccgcaaaggtaataggctgctccaatcttgccaatgccggcgttccgccgcgagtgagccgcaaaaatcttcctctccgtctgtcgagcgtattttcccgcatcagccttgtcagattgtttccgccaccttttggaggcagaaaaataaatcccaaaggtcgcaaacaggttgaacaaagggaaatagtaacaataaaaacaaaaataacattatgaaaacagagattaggcagaatggcaaagtgatactatcgagtacagacgatatatccattccgatgattttcaaaaacttatgtggtaagaacttttctggaaacgactatcaaaactatctcagaacagtttgtcaggatattggtgttacgacgggggcgattgagtattatgccgacaacgttttgattgagaaagcaactattcctgaattttaaaaactatatacaatgaaaaggaaagagaaagcagcagtagatgaatttgttgcccttgtaggaggcaagacatgggagcctgtacgccataaatgtatgggtaaatggagtggtatgaccgattacggttttgtcatagacggacggataacgctctttgtttccaatagtatggcatactttaagaaacggattcgtgagtggattaagtcgatacatacttttgaagcgaagaaagattgctaccttcgcttgctacgtgaacaaattgaaaaggacaacgacaaggcaaaggacgaaaagttaaatcctgtcagactgatagacattggcatcttatcccccgaaagcaatagtccgtttgatttttttaccccttatgtgttagtcgaaataaacggcaggcggttcaagcatcaaacagcggagttaagttgcgctattatggtggatagtttggcaggataccttgaagaatgcaactgcaaggatatatacacggcaagggcagtgcgtacacctgactacattttttgcggcgtgcggtttgactcccgtgataatatgtataagattggaaagtagagattaatgatgtctgaagaagttatcacttacaacgataactccagtcgttttaaaggacggcatcagcatttgacctactaaatacataagttcccaatttacgattggaaacttatgtatttttctgtatggaaaactaatcaaataatcgctgacttatcatccagtcattaagcacgtccggatctacacgatttgtaagattcacatttttactcaaacaaccgattttctcacctcttaaataaataactggtggggttaatgtattcggattgtatggacttaatgatgaactgggacttccatatatggaataccgattcttgaaagatatacttgaaaagtgactaccgtatatattctcgttgttggatatggaatcaggagtagatgtgttcaacgacaatctgcctaaatacaaaccgtcatttgccaatagaaacgattctttccttgaaattctggtatctaaacctattctatccattccctatgatttaacgccattatttaataatgccataacgtcttttagttgcattatcgaacacctctgtctctcttagaaactgcattacccgttccctgtcttcggaaatcaggcaacctttcagtttaccgttcttttccgtgatttttaattttgaaagttcgaatatatcggaacaatccagccaactgtcatagtccagaatatcacgatagttccgaaccatcaaaggatattggcagtccagtagctcttccgacctcttggaagaatctatttccgaatttatcagtaaggcaccgatagcgacaccttccggagtaaagccgataataacaatatatttattgcggtctttatatccgtcttttagtatcagtccgtcctcttcgtccaaggggacataaataatgtcaccaattttgactgatgacatatctacttgctcagctttggccattatagctttcagcttttccaatgcaccggttttgtcgtccatttgatttaagataaagcgttcttgacaatctgcttttctcggatataatctaccatgtccttggtagcttttcctgcccgggctatatctataatggtaatgaagtttttttgaggatcatcctgaatgcgtgtcatcgcttcttcccatgccgagtcatgcgacaaatcggacaagtcataagggtctgtatccttatatttagcgatagcagcgtcaagacaacgtttgttggcacctgatatatagtccatatcgggtacggcagaagtatataccttcttgtcacgaacctctatgtctgaaaggaactcgtcaaaattcccatccaagggtttgccttctgcaatttgcagtgccttgtaggtataggctggcaccgggccatgcttcaatgctctgaaagagtcttcgacaatcactttgccatatttgacaagatggtcctgttgggcaaaataaagtattttaaataactttatatagtccactccttgagtgaaactctgcatgatgtagagtaccactgctcttattttagcaatctgtatagctgttttcatttcaaaaaaatctatgcgattacaaagatacaactaatttgctgaataatacgctcatgatacaaaaaaaatagtccgttgcatttttttacgacatttaatatagtcgtcattctgagagtaatagtctgcaattatcaagagatgggccaatccacccgattccacctccctttatagttcaccttcctccgattatagtacgggcaatccgttccgattgtccgttaccctgttttaacacccctgttttacagttttattcatccctttctatttgattgtcatttattatcgttttgctgctgccgtgcgacctctcgtggacttattttcccgcaaaggtaataggctgctccaatcttgccaatgccggcgttccgccgcgagtgagccgcaaaaatcttcctctccgtctgtcgagcgtatttttccgcatcagccttgtcagattgtttccgccaccttttggaggcagaaaaataaatcccaaaggtcgcaaacaggccgaaaaaagggaaaaaaagaaaggttaaattatgagttacaacaaattgaaatcattggtagcgaacgtggaagccatagaaacggcaatgaaaatccaagttcaaggcaggcaggccactgcggaagaaaaagaaattttatcccgatattctggtttcgggggtatcaaagaagtgttgaatataggtacggacaagcccataggtggtgatatgcaagaaccgatacaaagattgcaggagttaatcaatgcttaccctcatttcacagaacccatgcgacacaatgtcatagagggtatcaaagcatctgtactgacagcattttacactcctaaattccttgttgatacagtggtgcggcagatacacgccacgttcagcgaaaacggcctcaaaatgcgttcatttctcgaaccgagtgcaggtataggcggttttctgcccatagccatgtccggcacgtatgactatgccattgagaaagatctcatttcggggatgatactttccctgctccatgagaacacgctaacacggacggctgcatttgaaaccattggagaacaaggttttgagcatacaactttcgatgtcatagcctccaacatcccgtttggcaatttccgggtattcgatgcggagctgtggaagaaaggcggtatgtacgaacaggccaccaagaccatacacaactacttttttgtcaaagcgatggagttgttgaatgagggtgggttattggctttcatcacatcgaggggcatagccgacacgcccggtaacaagttcgtgcgtgaatatcttgtaaatcatgccgacctgataagtgcaatccgtctgcccgatatgcttttcatgcagacaagcggtatagaggtaggcagtgacctgctgatattccaaaagcacacgcacaagacggtactctcacaacgggaacaactgtttttacaagtaggcagggaaaaggcggacgccataggcacaatgaccgaatacgccaacaaattgtttaccatgccgaaaaccacccttgcaacaggtagccgcattgtgcagaaccaatacggaaaatatgtgcgcaaataccaatggcagggaaatgaaaatgccatgtcgcaatatctcgccgcactgctgaaactcgactttggccgatatttccgcaaaagtcttttcacagggaacggacagggcagcgaacatatgcaaatgtcccttttcgggaatgtagcgatgaaacaagtagaaaaaggtaaacgagcctacacggatggggtggaagcatggatgaaagacggcgcaatggtactgtttgagggccaggtgggtactatccaatatcgaaaatcaagtctttatcaagaggtagccattgattttgtgccggtggacgagggtaaggtcaatacagatagggcgaaagactattttcctatacgcaaagcatactttgaactgtcaatcaaagagagggaagaacaaaaagaggataacggattgcgtagagagctgaacgcccgatacgatgcctttgttgccaaatggggctgtttccacgagaacgacaacaaggagtttatcatgcttgacagcctcggtgtggaagtctttacaatagaaatgcagcttggaaaagatttagtcaagtccgacatcatgcgtgaacctgtggcgttcaagaagatagacccgaacaaacggctgacaccgattgaagcgttggcaagcagcttgaatttctacggcagggttgatatggactacctgatgcagtccacggatagtgccgaggaagaaatcatcggcgacctcaaaggtgaaatattttacaatcccgctatcggggagtgggagcacaaaggcaagttcctttcaggcaatgtcatagccaaatgcaaggagataggttcttacttatccgaactcacggacagggaaaaagattggacggaaactgctgtaaaggctttggcggatgtgacacccgaagcgataccctacgaggaactcgacattaacatgggtgagcgttggattgacactaagttatatgccgattttgcaactgaacttttcgagaccgagacaagcgtaatgtatttcgatgtgaacgacacctacatagtacgtctgcaaagttactctccggtggcttacaacacctatttcgttcgtaactatgacggtggggatttgtttgttcatgccctgcatgatactgtacctgaaatcacgaaagagatataccgcaatggtgataaggtgcgtgtaccggacgaggaagccatacaggaggcagccaccaagatacaggagattagagaccgtttcaaccgctggcttgacaggcagccgatagaggttcgggacgagctggtgagggtgtataatgagcgtttcaactgctatgtcaggccgcactatgacggttcggcacaaacctttccgcagctctctttcgagcaatttccatacgatagcctctatccctcacagaaagatgctatctggatgattaagcagaacggaggcggtatctgttggcacgaggtaggcacaggcaagacgatgataatgtgtgttgccgcctacgaaatgaaacgtctcggattggcacacaagccgcttattatcgggctgaaagccaatgtgcacgaaatcgccgatacgttccgcaaggcataccctacggccaaagttctctatccgggcaaggacgattttacccctgccaacaggcaagaggtcttttcaaaaatcaagaacaacaactgggactgcatcatactcacgcacgaccagttcgccaagataccgcagtcagaagagaccatgatagatatattcacggaagagcttgccgatgtggaacgtaaccttgaatttttggagcagtccactatgcgttaccgtagcggaaagatgcaggaggggttagaaaagcgcaaacagaaccttggggctaaattacaagaactgcgtatgaaaatcaataatcggaaagacgatgctgtggacttccacacaatgggaatagaccatatttttgtagatgagtgccattatcagaactttcttatttttttgtttgacattctaaatatattgaaattcagcatcttttttatataataagttctgattatttttacggtcgtaatatgcagggtatagaatatattctgtatcaatttggagataaggctgtaatgtttgtatttgctcaatagtccttttcgtaaatttggatatcttaatgatttttctgattgcatttgacctcctgtttctaaagagaaactgctcagtggaagtttttagtatttgtccaataaagcacataggttgtattctgtttcccacattcttgactgttgaactctgtaccaattcttcaggccgttgcgtaactcccattccaataacaccgggcatatcaaattgtcaattctttattacttggcattttttagaagatgttacgttggcatatagttttgagcttgtatgaaaaatgacatttactactaatgaatcaactttacataacataaccatattttgcatcggaaatatgagataattttccttttttattgtatctttgtatttgataggcatggaattttcataatgcatgagtttaaccatccataatattaatgaataattccacttacgtgctgtatcttaacattttgatatttatttaaaactctaacttaagtataaattacttctattttttgttttatgagttctaattttaaaacacctctttctgtatatgtcttgtatgacaaggataatactaaaggtagcgaaacatatgagaaaatttaccatcttctgtgtcgtaattcaagtaggccttttgaagatgggcttgatataccagtgttctttcgaacggatatggccaatcaaattaccccgatagatataaacttcagtaataaaactattgcaatattattggttgatgacaatatgtattgtaatactatatgggatgagtatataaaagaattattagtaaaacaagacaatggggcactaaaaatatttgccgtcaaactatccaagtatgctttcgacataaacccacttcttcaagaagaacagtttatttgtttgaaaaatgagaatattgaaactgattggcatgaatttcaaataagactttatgataacattttacgctatttaaagtcttataaagttgggcaaaagctaaaattattcattagccattctaaaaaggataaagatcatttaggtgaatctacggcaatttctttaagagattatttgcgttcagatactaaactcgattctttcttcgatgttaatgatattttggatggtcatcaatttgcccaacagattcggtcaggtatagcttcatccttattagttatcatagaatctgatacatattcagaaagagaatggtgtcgaattgaagctatccctggtaagaaaaataatgtaccttcaatattagtaaatgtattgaatggagtttcttctcgaacattcccgtatttgggtaatatgccaaagattagatttaatggcaaatgggatgacgtaattatcttgcttctacgtactgcgttagaccaatattatgagaaagaatatcttgagcaattggtaatgaagtgcgatttgcaaaatacttctattcttcctgttcctccggaattaatgaatttaattaatattgaagataatataaaatcaatactctatcctgaaccaccgttaggtcgtgaagagttggaggttttgaataaaaatggtaagattacaagttttgttactccgagtcagttatattcaaatatgaataagatacaggataagaaaatcgcaatttctatttcggaaactccggaggctttaactaaaggaatcggcaaagccatgtttgatgatttatctgttgaaatagctcgtcatctgcttgttactggagctaaattggtgtatggaggtgatcttagaattggtggtttcacaaaacttttatgcgatctttcatgtcagtatggcataaaagaaaagtctgatccaagtacaatctatttcacaaattattttgcttggcctatatttaataggctctcaaaatctgacatcgctgaatttaaatacgaccgtgtggaaatagtaaaaacagaaatacccaaaggtgtaggtgaggaggataaggggaagttctttgagccaactacgccaagcaaaatgtttctttgggcaaattctttatctattatgcgtaaagaaatggaagagaatgttaatgcacgtatcgttttgggtggcaaaattgtcaattttaaggggcgtatggccggaatatttgaagaggcgatttgtgctatacagaaaaaacatccaatttatttattaggaggatttggtggagcttctgcacaaatagtgaaactaatgaaaggtgaaactacggcagaaaaactatttgaagaagcaaaaaccaatgaggattataaaaatttaattgaatattgccaaatgagttgtctgccaacgataaattacgatgaactaaagaaattcgaaaataaggattatcaggttcttagaaatggacttgataaagatgaaaatgaaattttattcaactctattaatattcccgagataatatcattgattctcaagggtattaataaagcttttaactattaatataaattatgcataaagtatttgtaagttttcatcatgccaatgaccagaaatataaagaaggtttggttagttgggctgaaaaaaataaagtattcattgatggctctgttgacatgggcgagattccagaagattgggacgaccaaaagatacgcgaatatatacgcgacgagcatttgaaggatacaaccgtaaccattttacttgtaggaactgaaacaaaaaatcgcaagcatattgattgggagttatattcaagtatgtacgatggtacggtgaataagaagtccggcattattgtgatattactaccatctgttaaaagcgaatattatacatgcgctcatagtagtgagaaaacgttctacccagagacgacacaatggatgtctattgatagccgagaagagtatcataggcgttatccatacttaccggaacgcatcattgataatttgctcgaacccaatgcctttatatctgtaatcaattgggataagttaacaccagatattttgagacagatgattgataatgcatataatagtcgtgccacttgcacttatgatttatcaaggccaatgcgtaaaaaaaatggataagtagaataatagattatggcattaaatagattttatttaaccgaaaattccattgcacaaagaagtggtttatgtatattcataagtcaccaaaaaagagatgcggacactgctaaaaaaatagcagactattttattacttctggtattgatgtctattttgatgaatatgatacaaaaatagacagaacgagaccttactcggttgtaagtgcaattaaaacaggtatcagaaacagcacgcacatgttatgtcttttatcccaaaatgcattggattcaaaatggatcccttgggaagttggatatggatatgatagaacaactgttgtagggttaacattaaaagaaatatcacaatcagtcttacccgagtatcttcaaatcgttccaattctaagaggtacaaaatcgttgaataactttatttctaatgtgttaaaacgagatgaatcaacgcttataaatgagaggaaattatttgccgcatatcaatctcagcatcctttagactctgttcttaattgggaactgtaacataacttccagcaggtataataccttgctggaagtttatataatataccaaacagtacttgtatatcttaatcgggtaagaggaaaacgaagaagtaaaatttctcctactcaatttgtttttgtaagtcctaaaagtatttcaagatttgcttttccttcctctgtcttccacttttttctcattttcttttgattttcgccttcaagggtttccaaagctttttcttcttgttttgtggttatatcaagatataccattgtggtttgaatactttcatgcccaagtaagtatgagatttgggctatgttcatcccgttttcaagccagtgtgaagctttggcatgcctaaattgatgggcatgtaaatccataggaacatcttggcacctttcatgagccattgtggcatattttttcagcatcttgttcacgttttcagcggacatcgggacatatatgcctttgctcttagaacagaaaagtaatgcatttgcatcattctgtttcggatggtatttgataagataccttttcaagcattgtgctggcttggccaaaagaggaatcggacgtttctttcttcctttgccaatgactattatgtgaggttttacacagtctataacaatattgctaattttcagagtcagaagctcgttgatgcgcacagcggtggaatataagagaagcatcagagtgtaatcacgaaagcctatagtactcccttgattaggcatggacaacaatacatcaacagcctgtttactgagcccgatgacctttcttttagagtttttctcatttggaacattttccgcttgtaagaaaacagacatataggatatatctctaaacgacaaatatttcagaaaaacacgcaaggctgacaatcttacattacatgttgctggactgcaacccctattttcctttaaccaaataatccactccattatatattccatacagaaacattctgcgcttaatgtttctggtgtagtgccttttattactctgaggaattctacatagagtttcacggagatcttataatttctctttgtgtgaggactgcatgccttgattgaagggacatagtgttcgagcaaaccttttgcgcagttcctcacacaagcctgcagttttcttcctgcggtcattgaactgtctccttgatatgagattgggaatgcagtccttgtactcttgcaatttatagtcgaacaaccacttctcactatcaatgctctctgtctctgctgtcagggacagtgccactacttccaagtcagaaaacttaggaacaggaccacggcgtggaacattacccgattcattgacgagattttcagagaattgcttgcatatctcaagtattttgacgaattttgtataaaggttgtacatacgatggtttgaacttaatgtttgattgtcgctaagttactaaaaatcaacgatatgtgcaactttttactcatctttatcaacttaaattaattccgccaacgggtaacaatcaattaaaaaacaacttgttatggtaaagaaatttttaacaatcatgtttgcttcagtgatggcaatgctcgctttcactgcttacagcaacgacgatgagccacaaggaccgtttggagaaaaaatgttggagaatatcgacaagataatagtcgaccaagctgatgccggaaatctctatcagaaaaaggatgatgctgcccggtttatattggtagcagactcaaaggaggctgcccatggagtgtgtgagaagttcattctcgatcagtgggacgtaaagcaacgcactgtcaaactccctgacaactgcggcagaatctcactcacacccggttcggacgaaagtatcttttacaccgtttcgttcaatgctctcaagaatttcaaagaaccggacatgacagtcgtaatcgttccggaggaatacatggacggggataatcttgctatagaccaatacttcccggcaagatggactgaaaaatgtcccaattgtggtcataagtggaaaacatttgcatccggaccatatacatgctccgaatgtggtcataagtttgattagtatgcacaatactttccgcgctatcttggcaatgacaacgttcctggtaacaggagcgttgtcatcctgtaatcataccgatgagttggagccggaatctccggcaccacagattgtttttctcttctctccggggggattgggtgacatgagctataatgaccgtatacttgagggtgttcagagattcaagatggaaaacggagatatagacatctatatctactccccggaatccctgcaagaggctgagaaaatttttgcggactggcttgaacgtccccaaagcagcatacccgtgctttttgtattgggtagcagtgattatgagccaatggcggaactttatctggcagaacacgacttgacacccaacaaaagtattctgctttttgaaagccggaaacagtataaggacgagaacatccataccttccagatttcgatgttcggggcttcataccttgcaggagtatgtgcaagaaaatgttctgagatgacacctctggtgctgcttgccaataataccgacagccccatcaacatagccaaggacggttttattgcaggctatggcagcgactgcgatgtggagtatctggcggatgattggacgggatatgtgtcggcttcgctcgcttaccggaaaatgagcgattgggcggttgattacgacttcatctttccggtggcaggtggctccaacgccggtatataccgctactcccgtgaatttgaggtctcaccgtaccttgcaggtatggacatcgatcagtcaagcctctccaaccggattacgggttcggtcattaagcatattgaccaattgatttacaggtatctgacggaatgggtcgtcacaggggatatgccggagaaccaactttacggtcttgaaagcgggtatgccgactggctggtcgcaccccgatacgtgaatgatttcagcagcttagtcaatggaatgcgccctcaggctatgatttttgagaaagagtattatgaaacaagtggttattaaacttattgcaccgctcctctgcctgattggtctgtggagctgttcggacgatgagccttccctgtctcctgacaacaagcagtggacagagaaggttgttgccgtggtgcttcccatggagaaagggcttgatgtgcattggaaaaggacattgggaatgtttacaaccaactttgagcgtgcattcaagaaccacgaagcgggtataaggttaaagtttgaatactacgatgaggcaaagaccgatgtgcgggaacttgcccggtcgctggcattcaacgacgaggtgtatgccgtaatcggcgggctgtattcttccaatgcggcaatcctcgcggcggaactgactattgtgggcaaaacattcttcactctcgccaccgccgaacaactggttcgtgcatacgcatcgacaggctatctttgggcgatgaccgagaccgacattacgcaatgtgaggtgcttctctccaaggtgattaactatgagggtaaaagtgtggcacttttggtcaaggagaacgacggttacggacaaacgttcattgactggttcgcatttcaagcacgcgaactgggcttggaaaacatgggatgctatgcttacacctctgacaatatagctgatgtgtctcgccaagccatgcagtcaggtgcagagtatgtgatatgtatcccctctgaaatagaagagatgaagccgatgcttgaagcgcataaagcacaaagtctgaacgggcgcagtgtaccgcggatgttgttttcggataccgcctacggtgcggatgtactcaagattcacggtgatgccgccgaaggcatagagggagtcgcatttggtgccgaccctgagtcggggtttgacgtaagttacaggacctttttcaatgctacgcctactcttggagaatctcagctctacgatgccgctatgctcatcggctatgccgcatggtaccagcagttcagaccggagttgtcgttacagaaatcattaagggccgttgtttcgggtgaaggcttgaacatgggcagctggacaggtgaggatatggggcttgtggtggatgcgctcgctgccggaaagtcgccctatgtccgtggagcgtcaggacatttaaggttcgatgccaaggtgtttaccaatgtacttgccaccacttactataatttcaaggtttacaacggacagtacatcatccttgactataacaccagcgacggggggaaccgcacggatgcgacacttgccggttggaactggaaagccttccggatgcaggatttcgacaattcaggagaattcaattaccctgcacataccggcaactgggcactccttgtcgcttcctccaaggaatggaccaattaccgccatcaggcagatgtgctcgctatctatcagcagctcagacaagccggatataccgacgaccgtatcattctcattgtcgaggatgacatagccgataatatatcaaatcccaacaagggagtcatacaggtgactatcgggggaaacaatgtatacgaaaatgtagagattgattatcgtatgtcatcgttgaatacaaaagatatacttgccattctcagtggcgaaaaaagcgaaaaactgcccacggtaatcgaatctactgagaacgacaacctgttcgttttctggagcggacacggtgtgccgggggccatgtgttgggatgaggaagcttacgccatgacaggcgataaactgtcttctgtttttgaggatatgaaccgcaaaaggcgttaccgtaaacttctcatgatggtggaggcttgtttttcgggcggtgtgatgaagcagtgcgagggcatccccgggatgctgttcgtcactgcggccaacggcgacgaaacatccaaggctgatgtcttcaactcagagatgaaagtgtggatgagcaaccgtttcacctccacctttatcgaacaaataaccgataacaaggaggtggctatgcgcgacctctattaccggctgttcatcaatactgtcggaagccatgttatggtgtataatgctgaaaactatggcaatctttattcagccaatatgtcagaatttataaattcaatagttcgttaaaaaatagccacgcctaagcggctctggcagtaaataaaatgagttctttgaaaagtttgtcaataacttgcatgtctgggttaatcccgaacacgcaaataaatcgttcaagcatataagcattgtgtataaaagacttgcaggaggatatggaataggttattccgagcctcttacatgccgctttggccaagttgacagcagcaagcgatgcattgaagtgaaaatccaactttctgaagtcggttgactgacagttggtgattcctgcatgttgcttaccatctctcaaaattccaattggaacctggttctgtaataatccagaacctcccgtccatccatcgaatcgtctgtagagaagtaaagctgccacttgtctgtcctcccgtccatcggataccagatggctaaggaaacataccttttgagagcttttgcatataccctcaatccgtatagctttcctttgttcacctcgtattccttgcaccgggtcagatccagattggcaaagtcgattcttccgtcaaaccactttggatggccacgttttcctgttttctgttccaatgtcggatagtacaggattacgtcattccgaaagcggctgatgacatggaaatcgttctcacacataggcgttatgaatgtttccttggaaaagaatgcgtctgcaaccaccgttcttgatatgctctgtatcttgtcttttctactgataagatagctgctgtaccagtcaacgaggttcttgtccatattatccaaggttttacaatccggtgtctgaatggaacctaaagtcatgcattcatggttgtcgatgtctatgacaccgatgcccatgatttccaatccacgcttgtactctcctgcacaaccagaccagaagtaacctatccaaggtgtcttcttgcctgatttggggatataggaaggatcgatggcgatggcttttcttttacctgtgagatgcttgctgatgatagagccgttgaacgcaaaccagtcgaaagtttcatgctcaaaaaggttacggtaggtctgttccgaaaaacgtccatacctacccaattggaggaagtttatacgatcagggatggccatgaataatttcattgcatccatgaacgttttttcaaaaggtttgtgtatattcacgactgatttgagagccgataggcactcggattggtattgcataaggagtgtttctttagtcataatcagaagagttgggagacttctaatttactaaaaatcaacgaattatgcaatactttccacctttattatcagcaggttagcactcttttttcagtacatttcttcatgcttaaccattcgtttttgacaacatttcaatgacctctttagtgttttcgaaccagcttttgccggttctattgtttaacttttaatttttcagcaaaaaacagcaaccgttgttttacttacttttttcttctgcttaacataaccgtgcattccgcaagaacttttgtggagtcatgccgtatttctttgtaaagagacggtacagcgaggtggaggagatgaaagtgcattctttcaatagttcttctacactggcgtatttacccgaaagcaaaagttccgctacatattcgatgcgcaaatcgttgatatattcgctgaaacttttacctgtgaactgacggaacaagccggcgaacttgttagcaggaatattgaattcgcccatgagcgccttgcgggagaaagtgttgtcgaggaagaatttctgatcaatgatttttactttgatttgctcgaacagcagtaagtctggatcctcatcgtcattccatgcaatattttcggacagagtactacggtttaacttctcaagctcttccttatatctcatcgcctctttcacgttggcaaccaaagaaatgttcttctttctgatgatgcggttgttatatcccagcacgcaaccaatgatagctaaagcaatcaagatgcagatggctatcacaagctcccaacgttggtgagtgatttgagcctccttgtctttgacatcgtagatgatggacaactcttgtgaggaactgcgcaactcccttacacgcaggctgtcccgcaatacgcttagtcgctcaaaatagcttgccgccttgtcatattgttccaatccctgatatgccatgccgtagaattttaaggtggaagacatgtagaggttgatagtatctttcttatgcatcatctctgtttcacgttgcttgcacatatccacgatttcatcataacgatgcaagtcaaagagataaggcacaaccaagtaggcgtaccggcgattgatacgccccatcttctgaaattcagaatatgcctcattcgcttctttttctttccctaatttggaacatacgacagcacgatgggcaagccatttgcatttttcttgctcatagagtccttccatttcagcctcgcctggagttttggcatacaagtatttctcaagtttatcaagtacttgaagggcttccccgtatcttttatcacgctcgtagcagataagcaaatcgttgcagtttgcacgcaaattgtcatatttcctgtcgtaatgcgatttctccatcatctctgtggcttgcaacatatagacataaccacgttctttcgtgccttgttcatgaaggctcttgcctaaataaaatagggcaatcgactccataccactgtctccagcttcttgggcattttgcattaaaagctttaccgtctctgcttttcgcttttcatcatataagccatcatagcatgaaatcaaacgatgaagcagcttcattgtcatctgctcatctcgcttcaccgcctttgcagcaagggcgtttttatagaagctggcagctatgatgaagcggccggtgttataatacaagtcaccttccgttatatcgagttcatgagtagcttgctttcccttcttccgtagttccatcatgatgcgttcagccaaaggtgtgtccgaaaaagtaaactcgtacactttatcttctgttatcaggctatcgggcaaggctgaccggttggcgagcaaaggcatcgcccacaatccgcaaacaagcgaacataaccatattctcatttttctatgcaaatgccttttcattatactatgttgttatgattatcaaaagtacaacttatatctaaaattaaggatgctttacttcttttttggtaatatctgggtaagattatgaagatttgggagggaaattaataatcgggaatggcagctgaaaaagcgaaagagtgtattctgagtaattcagtaaatctatcttatgtttgttaaacgaaacaatcgcttgcttgtttatttggcgttatttattcttgcagacacatacattaaatattaacgtttaaaattccaaattatgaattacaagaaaatgacttttagagcctcgatgctcggtttgatagttatgttatttgccggtttagtcagttgcagcagtgatgatgatgacaaaaatatccctgtagaggaaactaaagttccaacaacaggggctattgtttttttgtatgcagcaacggaggatgaactgtctatatgcgacatgattgcggagtacacagatgagaatggagcgactaagacagaagctatcactgctacaaaatggaaaaaacaaatcaattttagtagtttgcctgccaaaggattgatttccatcaaacgtacgttaaaagcaaatgtggaattagagaagaagtcttatcaatttagtagtcattcgctattaatcacagtcgctatctttgatcaaaacaaaaagactgttgattctgctacatctggtagtactaattcatatttatctgtaggaaaagacaaagtagaagaatatatcaaaaaagagagttctaatacttattattcttatgttttagataagaaaaagaatgcgcaagatagttatttcaccatcgaatatctaaagcaataatacatgagaagcagcatcatcacattagtccttcttctatcaatcggagtatcttgggctggagaccgcaatcgtatcatcgcattaggcgtgcgcaacttcacctatactccgaaagagggaaaggaaacggttggaagcgcattaggctctattgcgaacgtcttgattactgggcagaatactacacaacaaccacaatacaaggatgctgttagggcagctattgtgagaggattgacttccggctttcgcacaatcgctaccgacatggggaatattggtgaacaaacgaatgccacttttgactattatgtggatgcaacaataaataacatttccaccacgactaaaacggaatcaataactactaccaagaatggtgttaacacatactataaagccatggtgggaattaccctgcaattcaaagattcacaaaccgaggaagtgatagctagtccgatgtttaagatttccgacgtagatgttgcatggatagaaacagaggaaagtgcgattacctctactttgcgcaagttgtcagcttacgtaggaggatattgtaatcgcaagtatccaatctatggcacaatattggaaagtgcccgacaaagcaaagacaagcaaaaagaggtgtatatcgacctcggaactaatttaggcgcatacaaaggacttcatctaactgcctacactgtaaaaacgattgcagggaaagaagctaagactcaagtaggcaagttgaagataatggatgtacaaggcgaggatataagcttttgcaagatacaaagcggcggcaaggaaatcaaaaacatacttgacaagggagaaactatcttcgtgaaaagtacagagtaataacaataagttgatgccaaatcttccaaatcggttcttcgataaatttttaataaaaaaaacaagattatgacaatgaacatgaggtttttcattattgcagcagcggcaacgctattggctgcgtgtacacaagagaacgaggtacagaacaatccggtggaagcacgaatcacggcaggcgtgagcgggccgaagacccgtgctgtggacaacgggtggaacgccgaccgaatcggcgtgatggtggtggatgcccctggcacgaccacgaccatgggcggcaagtacaagaacgtgggatacgcgaccacgagtaccggcaccaacgcggacttcaccccgatgacggcgggtggcggcatcttcttcgaggatgctttcctcgagtttacttttgccgcctacgcgccttacgcatcgggcgcaaacgcctccaccctgcctggtacagacgggaagattacggtaaatacaagcaaccagcccacgaccacggaacaggagaaggtggactacatccatgccacgggagccaaggccgataaagacagcccgaccgtcagcttcacggacaacaccgccgcgggcggcagcgactgctccttcaagcacaagatggcccgtcttatcctcaaggtgcaggtgtcgaacaccgacggtttcgacgacactgccgtgctggaattcgccgactacaagctgggcggcctggttcacgagggaacgttcgatgtgaagaccggtaccgccgcgaccgcgggcagcgttgtgagcgactggatgttacgccagtgcaccggtgccccgaagacggccacggacaagtgcgtggcaacctttgacgccgccacgggcgtgatgactttcaccatgatcctgctcccgcagacactcgccaacgctttggtgcttgagatatctcccgatgacgaggaataccagagctactccaacaaggacatgatcaaacccgcgttggaggccggttattcttatacctacaccatcacggtgaagaagacggggctgacccttagcggaagcaccatcgaaaactggaacgacggtggtagccatgcgggtgatgcaaaaatgtagtgtgtctgaaagccactgccgtgcatcaggcgtaagacggaggcacgccatatataataaatggtgcggcagcccgcgtcgcaacgggcagtggcacaaaacgaaataaataaagacaatatgaaaataataaggaacatagcgagaaggccgtggccgcgcatcggcggctggttgccggttatgatgctcatctgtggggtgctcgcttcctgtagcagtgaggatgaaagcaccgcgcccctgcccgacggcaagtacccgctgcaactgacggcggaggtggcgcagccgcagacccgcgccggaggtaaggatgcgtggacgggcggcgaggagattagagtgtcactggaaggcgtgtttggtaacaaaacatacgtgatggacgcatcgggcaatgcaagcccgaaggatgccgataatgccttctattggaagaacaccgatgaagcccgcgtcagtgcatggaccccggacatagaatcggaaacggatatttccgaccaaagtggcgggtacgccgctttcgatgtcctgtacgccagtgccatagggcgttatgaccaagccataaatctccgtttcatccaccgcatggcgaaaatcgaagtaattctcaaagctggcgaaggcattacggaagaggagttggagggtgcgaccgtcaccattttcggagacccgctaacgcactcaaccgccggcttggtatcaccgggtgaccaatcggacggcgagataaagccctattacgatgccgcaacgaagaaatacgaggcgttagtgccgccgcaggatatgacgggcaagccgctcatccgaatcagcataggcagcaatgactttacctacactcccgaaacagaagctgccggcaaatttgggtttttcggtggcaagcggtatgcctacaccatcaccgtgaaagccagtggcatagaggtgaccgcagccaagggcggaacgtggaacgccggcggcagcgagaatgtgggcgtgaccatcacctatgacggcacggaaacagaaccgaaaatcggcgactattactactccgacggcacctggagagacggtggcctgcgcaagctctatgccgacggcacgatggagtgggcagagaccaagccgcagccggagaacggtaagaacgttatcgccatcgtgttccatgccggtcatcacgaaaacgatgcctccgattactccgccaccggtatcggtcagcagaagtgccacggctatgccgttgccttgcaggatgccacaaacggttattgtcagtggggcgtttacggaaccgagttgggttgctgccccacggatggaagcggaaaaaaacagaacaattactctgcacctgacatcgactggagcggctacgcctggacacagaaaatcatcaccgctgccggcggcaaggacaagttgaatgccaccgaagattccggttatcctgccacctactatgccgttgtggattatgcgcacaaagtcccgtcccctgccaacagcaccggctggtttttgccctccatcggccagatgtggaatgtttatcaaaaccgcgcttctttgtttgaaggcaagacagtggtatcaggcttaaagtctgactggtactggtcctcctcggagttctacgaccgtccggcgcgctacgctctttatgtgcgtgtgctcagcggcctcgtggacagcaaccctaaggacaacagcgatagtttcgtgcgtccggtcttggctttctgacctatttacctattcaatctatttatctatttgcggcgtagccgctcgttgataaaggctgaatacccgcgaagcgggtcggaaaaatttttgaaaaatcgagttatggcattatccgaagaattacccctataccgcgacacttaccggttgttgaacaacctgttgatcctgacgcaggattttccgcgcttcttccgctacagtatgggcagccgtatggtggatttgactttggatatgctttctctgatttacaaggcgaacagcagctatgaaaaagtgggcgtattgaccgaatttctcgaccgttaccgcatgttgcagatgcttttccgcgtatgtgtggagcagaaggtcattaccgagcgcaaatacgcctcgttcgggctgctgttggagaagataggcaagcaggctacgagctggaaacaatataacgaacgcggaatgaagaaacaggaagataaaaggcaatgatttatcagtcgggattcgggcggtcaaggcttcccgaagcgaactgtttattattgaaaaagggttgtcggcaggctttcctcgtgcagggaggctcgcaaagacaaaaacagacaacatttactggtcctcctcggagttctacaacaatccggcgaacaacgctctttatgtgaatgtgaacaacggcaacgtgaacaacaacaataagaacaacagaaatagttacgtgcgtccggtcttagctttttcaataaaaatttaccgaagtattgtaaatttcaaaaacaataaatcaaaatgaaaagttcaatcaaaaaaatgtcagcactgctgacgatgatggctgtcgccatccttactttcaccttcaccgcttgcagcgatgatgacgatcctgtgacggaagtgacttacacctacggcttctccagcatgtcggcctcacaccccgactttctcgaagagatggggaaaatagagaacgccttccagtcagccctcggtatcaccggcaagctcttcaccaagaaaggtacgatagaagaatgtgacaaacaggtttacgaggcttgccggaaagcattcgattcgctcaaaagcgaggcctggcaaggggattacaccttccaggttacgaacgtaggaacaggcaaggtggtatgcacggctacattcagtgccgacaacgaaaactttatatagttttattagcatgacctgttggcggaattaaaatagcgcatatttaactctgccaataggcttttcatttttgtagttaatatattgaaggattgtaagtgcgctaatcttcccaataatccgggcaaacaatccatctgtatctttcgcataattccttataatcataaactggtcacacaattgcgagaatagggtttcaattctttttctcgctttggcaaaagctgggaatgttggcttccattctttttgattacatctgtatggtacctccaatctgatattggcagtttcaaacaaatccaattgcacttgggcacttatatatcctctgtcccctatgactgtacaattactataatccactttcacatccttcaggtaatgaatgtcatgcacacttgccttagtgaggtcaaaggaatggatgataccacttaaccagcagactgcatggagtttatacccataataatacatgctttgtgatgcgcagtatcctaccccaggtgcttttctaaaatccttctttcccatactgcaacgtttggaacgggcaatacgacatacttctatcggtttcgaatcaatacagaaatagtcttcaccaccatccattttagaaaccattctttctcggattgcattacatagggaggaagttattttacgcctgtcattgtattgtcggcgggaaataaggttgggtatttcaaccctatattcctgtagctttgcaaacaacagcgactcactgtcaataccaacagcctctgatgccatgttcaaagccactacttcaaggtctgagaatttagggacgactcctcgtcttggtacattcccggattcattgactaaattgccggcaatttgcttgcatatgttcagtaattttgcgaatattgcatataagttgtgcatacgatatttgtctattaaaagtttagtcacctttaatttactaaatatcaacaatatgcacaactttttaaacataaatcttttataatttataggtataggcgtttagagcgcactacattcacagctgattatcagtcagttttcttttgacaaatcattcgacgaagtagcatatcgaagattgtgtccatattattacggcggttgaacctgaaatgatactcgtcaaggtatccttgaagatgctctttggagcaatggtggtgtattccacgcaaccatccctttatgttcatgatgtgaatatgaatctgtggatgccctttgcccttatccgaagggcgttgctccaattttggataatctttctttaacggcaggtagcctgaccattcatcggttatgacttttgcgtcctttgatatgtatctgtcgaagaacggacgaaaagaacttgccgaagcatcatctatcacttgggcatacgcacgtcccacgccgtctcggacaatctccaaagcgactatcacaagcttctttttgccttccgtgcttcgtccaatgattccttcctcttctcctccgatataaaactcatcgacatgtacctctcctttaagaggataattaccgctgctccgcatggctttctgtatcttacgcttgaattcccatacggttttctgacgcatacaatattcttccgccagttccaaagaggacatccctttcttctttgtcgatattttgaaggctatgtggaaagcgtagacaagcgggaattttatcttgtcgaacatgcttccgctggtaacgctctcgtcatacttacagcgtgtacaacggcgagaatagggatatctgtcattgcaataattggtatgaccgcatttcttgcatttgaagccgtctgcccactttatcgaggacaagtactcaaggcatgaggcatcatcggtaaaacgactataaaatttgattgattccactcctttgaatttatcgcgttgttccatgcctgcaaaagtaggcaaaatccataaagttagtgcgcactaaacgcctatacctataatttaattccgccaacaggttaacttcattaaatctgtgaggttgtgtcaaatgaagtgcaccccaaaagttagacaaaaaacttttggggtgcatttcagaatgagcccggtacaataccgagctcactactatagagatttaaataattagcgtttatttaacgtccaactttccgggggggggcacttcaatcttcttactttttagcccaccatagcggagtgaacacatcgtcaggtcctccaagcaattgcacggcctgtttgtaaccttcgggactgctgttttccaaacccgacgggaatttcaagcgttgcgggaagaacttcgtcgtctgcttcatgtagttggaggcattgagactgggcatcgtacgaatggcctgctctacagccggagtctcaaagaaaggcaaacccaatctgcgctgatcgttccatgcttccaagggcaaccatggcatttgtgcaatgtatttctgcgtgataatctttgtcagatggtcgttcaacgccttgccatacagcgtttccgaagccacaggataggtaaaggtataggtcgattctgctttggtatatccattcaccatcttcatggttttggtcgctgccggttcggccacgtgttcccattttacggaggttcctacattattatagtcctccgatgccaaataagcgtcggcaaagccacccacaccatgatatgcgaagctctcgcgtacaccctgctcataagcagccttggcgcccataggaacgctccagcctttcagagccgcttcggccagcaggaagtaagactcccaagaggcaaagaagatacgggaattttcactcttacgatatttcaagaccaaatgcgggatagcccaaggccaataatacatcttgttcaatgagcctttatcgccccactcaccgcaagcggcagtattccacgtaaacgtggcatccaattccaccaatccgtcggcatcgtctttatccttcagcagtttacgtttcactactttgtggttcgagttccatgaaggatacttacaatagttggcatcatcaaaattgccgggaatagagaagagtttataagcacgcggatcaattaccttatgcaggccatcgaaccaaaatcccttagccggatcgttcgttgtcaaagcataatggttggtgtactgcacacccatgtaatcggccggcttgatacgagccagcaaatcattcttaccggcaagctgttcgtctgatgtgatacctcccagaccgacgagcaggttattcatcgtggccgaaagtgggaagtagttccattcgcgcgtcatgacacctgtcagatcatcccatcccggttgttccttaaccgtgaagttatcaccactctcggagatgtaagcacctttagccgcatcctcaaattcagctttggctttggcggcatctacttcggaaaggcgcattgccaagcgcatacgcatggagttggcatacttcacccacttgccgaagtcgaatttataagcgcggtcgcactctttttccttgtcatcggcttttacatcagtcttaatcttacttgcagcatctttcagttcatccagcataaagtaatagacttctttgcaagaattaaacttcgggttttttcctgcgaaagcctcaatgggcatagctccgaagctgtcggtaaactcgctcatcagatatacccgccagatacgggccacttctttcatattgggtatcacttgggcttcgtgtgaattcagttcacctttcatcttttcttcggccaagttgatagcaagtacaataggcgacatccaacttgcatagtgtgaataataattgctaatccagtcgtcgttgtattcgccaaccggaagacctccgtttgtattcgggtcgacttggcgtgccgccgtctgccagttcagcacaaagcaacgctccgccacttcgggattctgctgagttccggtaatagacttattgatggcatactcaatacgaacctgttcgatattagctgctgttgggttggtgtttacttcttcaaaatcggaacatgaagccaacgcaaacagtccgacgggaagcgcatataatggatatttatagtttttcatattcgcaaatgtatttagtttagaatccgaaagtaacattaaacagataagtgcgtgaagtaggcgagctaccatactcaaatcctgtggcattggtgcttgtagcatagatagattcggggtctataccgttcatgtggctcttcaacatccatacgttgttgcaagaaacgcccaattttaattgtgtgaaaggagttctctttaattgttgcttgctgaaagtataagacaatcctaaattacgcaaacggatattggtagcgctataaatattgatttcgcccacaccgaggtttcctcctgccacagcattccaatattgttgtgtagagatttcagtggtgtttttctcatattctcccttttcgttcatgaatacaccgtccacaaccatttgaggacgctcaccattgaccactgtgacgttggacgtacctgccgcctgcatcgtctggtgagtacccgagaagatatcgccaccgaaacgagaatcgatcaggaagttcaacgaccatcccttataattaaaggtagaactgatacctaataaagcgtccggttgctgatttccaattttttgtttctcggtggttgccgtaggcaatccgttttgagtgatcagcttaccgtagtaaggcgatttctcatcagtgacacgcttcagcacggttccccagatttctccgtagttgcctccggcagtggcatatacctgtaagttgtcgtaaccgcccaagggataaagagtgatttcttcatcggctgtcttatagagttcgatgatacggtttttattggcagagaagttcaccatcaaatcccagctgaaaccgttcttcaactctatcggacgagcgtttaccatcaactcaaagcccttgttctcgatgtttccggcattcaccttacgtttttcataaccggaaaggttatccatcggcaaattaatcaactggcgggtagcatttgatttataccatgagaaatcgaatcccaaacgattattgaagaaacgtatctctgctccaaactcccacgacttgattaactccgaacgtacgctactgttatacaatgtcttatcctgagatacagtcgttgtattatcaggtgcctgaccgatggagtaagtattgtaaagctgataaggctcgagagagttacctacttctgcatacgaacctctcagttttgcataggtaaaccattcgggcaacggcttgtccattttctctaacatttccgagatgacccatgatgcggatattgaaggatagaagaacgaacgattctctttcgacaaagtagaagaccaatcgttacggaatgttccgtctataaacaggaaaccattgtagttgatttgagctgtaccataaagcgagttgattttcttacggctgaattcttcgcctacactaatcgacttcgtcgcattatttacagtgaacaaatcgggcactttcagttcacccgggcttgtggaaatggagcgatggcggcgcatcatcaagttacctccgaacgtagcgcttccaccccacttcccgaacagattatccttgcgggcactgagcaggaaactgtaattgttttcatagaaacgttcctgtttgatagagtaagtgtttttcaatgaacttcctgaatatgtcttgttctcatactcagtgaagtacatgtccgaacctgctctcaactcggcgtccagccatgaggtgaagcgatatttcaacgagccgctcaacaagaaacgatcgcgtacatcacggttcagcttgtgcgtttccatccaataaggattgatttgctggctactgccgtaccacaacattttgttgtccgaacgcgtgcctgccgagaaatcgcgaatatccatcgagcgaggtaacaaatacatggccaagaagttattggaattgttcttaccactgataggacgattttgggcctcggcgttgatatactgtatcttggtatcaaatgtccaacggtcatcttttccgaaagtagatgtggcacgtgccgtcaagccggtacgtttcagtttggaactcggaatcttgctactatcatccatgcgggtgagcgacgtatagattgacgtcttgttatattgctgtgtaaacgagaacgtctccgtcagattgataccggtattaaaatagttgcccacgttgtcgaacgaactcatacgcaccttctgatcgttccagtttgtgtactcctgtccttcgattttcggtccccaactggagccggcgtctttgtcgaacgtaccgttagaaccttgcccgaatgaattctgcatcttgggcgacatgaaaatggtttcggccgatacggttcccgaaatcgtgacacccaatccttcggtcttgcgtccggacttggttgtgatgaggataacgccgttacccgcacgcgaaccataaagagcggcagccgaagcacctttcagcaccgacatggaagcaatgtcatcagaactgatgtccgaaataccgttacccatatccgccgaaggattccaaaagtcattatttgccgctccagtgaagttctccatcggaataccgtctaccacaataagcggctggttcaggcctgtcaatgaattgtttccgcgcaattggattttagaagaactgccggggccatttcccgaacgtattatctgcaaacctgatacttttccggaaagagcgttagccacattagtctcacgagcctgcaagatgtcggctcccttcacctcttgcatggagtaacccaacgctttcttttcacgcttgatgcccaaagcagtcaccaccacttcacccagttgttgcgaatcttctttcagttgcaaactcaagcgttgttcgccattgtatttcacgctaagagtggcataaccgatgtatgacacttcgatgacatcgcccaccttaacacccgaaagcgtaaattctccgttcacattggtgatgactccgttctgcgtaccttttacaataaccgttgcaccggcgaccggaccgagttcatcactcacaagtcctttcaccgtacgtgtctgctgaactaccaatgctgtattcgtatcagcataactgattgaaggacaaagaattacccccccattaagcaaagcaaggaaatggagagcactttagataatctctctttaatcatagcaaaattagattagtttaacataaagtcacggatgcaaacatacgacaatattcggagtttacaaatatccgatacgcctcatgttgtatctgtaacaaacatacgcaatcgtaaaggagtctttttcttcctatatatacgcggaaacgaacaacaagttgcagtgaggcagactctttcagatagtgtttctatgcaggaggaaataagaacaaatcccgatacttgcccggagccactttcatgatttcacaaaacacgcgggtaaaatggaaacggttggagaagcccgtcttggcggctatctcctcgatactcattccggtatgggtgatgagcatacaagcataatctatccttttcttcttgacaaacttctgtaaagtgactcccgtctcattcttgaacagacgagaaaaggagttagtggccatgcaagccctactcgccagtagttcgttggacagattctcttcgcaatggtcttcaatataactgatggcttgtgcaatgcggacatcgccggtgtttggcttccattggcttccctcaacgcccaaaagtatctcacagataagtgcctgaacgttcaaaaaagcccctataccgaacgtggatatttgcccactgctcaggagatagcgttgcatatggtcgattttcgcttccagactttccgtcaggtcgataggaaagacacccttcagcgcattatcatacggaaatcctaacgagaaatgaacgaacaaatgcccgatggccccatttgccagcaactgttcccgctcactttccgccaaggcgccgaggtttcctccacataggcaattcccccgacggggaatgctattcccttctatgcgcgagctgtaatccgtatttggagcgatgagatagactttattcgtttccatgcgataggtcgtgccccgatattcgatgacaccgccaactccggtattatggtaaatccgccagaaaggaaacgaaagcgtactgtattcccaattcttcaaccaccaatacctgcaacaatgtatcttgatggaaacacggggaaaatactgcaccgtagtagacggatcaccggtaaataatgtctgcataggccatagctattaaagtaaccatctgcaaacatagtaaaaaagattaaacctgcaagaaaaggccacatgaaaaatacaccacacacttccaattcccgaagtcttgcaggaagaagaaaaatatttacttcaaagagtagtaaccgtcctgtcacaaccggctatatagatgaccccggctggaagtatagatgcagcacggtggagatatatttccagcacgatagagatatatctctacctaagcctgcctacaggtatctcttgcaggggatacctccggacaagcatacggtattaattctcaacaaggaaaagataatgaaacaaaccaccgaaacaaatacttttctccgaccgaagtacgttagtttactttcacaaccgccgctccttgtttcagtccatcggccgcagccgtcagtcgtatgcttccggactgtccgattgaaagcaacaatagtttcttcatcacgaatagacgttattagagtttcacacgctgtgcttttccgttgtatttcaccactgcacctttcgccttcaagtcaaaggcttgcactttatctttgcccactttcaccacattgaagatacgttcttccaacataccggaatattcgcccgtgcgatcgccgatggtcaaagttccctctgcatcgttgtaaactaatgggatggcagcatattttcctttctcatagttataattcaccccttcgtcttcgtagagggtaaatgccccgtcttgccctgcataaacaaagagcgtgatttcctctgcctgcttctcgtcgctgtattgcatgtcggggccaaaggggatgatggctcctgcacgtacatagagcggaatgcgctcataaggggcagccactgtcagcttccggccaccttccacgtaggttccggtgtagaagtcataccatccgcaaccggcggggaaatacatctcgcgcgtgcgtgcaccgtattcataaaccggagcaaccatcagtgccgggccgaacatgaactggtcgcctacatcgttgacgcttgcatctgccgtgaagtccatcaccaacgggcgcatgatggtataatcgttgaaatgggtcatgcctgccaatgaatagatatacggcatcatgttatagcgcagtttggtataataaacgatggaattatagcatggatgcccttcgggagcaatgttccatacttcgcgaaacgggtactgtccatgcgcacggaacaaaggacagaaagcaccgaactgataccaacgggcattcaattctctccactctttatagtccgcattctcgcgtcccgtccggttgagttcctgctggcctgccacgtaacgattctctacgcagaatccaccgatatccatcgtccagtaaggaattccactgacggcaaagttcagtccggcagagatttgcgccttcatgtcttcccaacgggtggcaatgtcaccgctccaagtggcggtggagtagcgttgcagcccggcaaagcccgaacgagtcagcagaaagacacgcttgtccggctcgatgccgcgttggccgtcatagatagcttcggcattcatcaaggcatacgtgttgaagaacttggccgaaggtcccagagccgtagggccggaaaggtctttacgatactgaatatccgtgcagtcgcgcacattcggttcgctggcatccatccaccatgcatcgattccgagaggatagtaatggtcttgtatctgtttccagaagagcttacgcgcatcggcatcgtaagcatcgtagaaagaacccagatagcccggacctacccagtctctgatactgtcttttacggcctgccgatacatccaacctttctcgtcgaattccttataatgctcagtcgtcacatagaacttgggccacacggaaatcattacacggccgttcatggaatggatagagtgcaccatccccttggggtcgggaaaacgttcagggtcgaattcatggcttccccacgcatcctgcttccagtgcaaccagtcgatgacgatgttgtcgatgggaatccgacgtttgcggaattccttcaaggtagagagcacctcctccttcgtgttgtacttttcacgactctgccaataacccattgcccacttcggcataatcgggctcttgccggtcagtgtacgatagccgctgaccacctcgtccatattgtcgccatatacgaagtaatagtttatctcgttctgcatttcgccccaccaggagagtttgttctgctcttcatcggccaccgggctgagcactctcaatccgcagtaagagacttgcccgtcgggtttccactcaatctttaaaggaacacgcttgcctgcttccagattcaccgcaaacttatagctgttgggattccaggccgtgcgccaacgttcgggcactgccaactcattattgatatatactttggtatagccggcataatagaggatgaagcggaataagccggtttccgatggttctatctcgccttcatacgtcacgcccgctcccataaacgggaatccgtccggcaggtttatcactttcttcaaacgggcggcacgatccaggtgttcgaaatagagagaatcctcacggcgcacgatggtctccacgcgcttatcggccggaacgtatgtacccgtcaaggcaccttccttgccatccttgtcatacagcttgaatacaccgcccaactgcgagtagtcgcgcgggtcgccgaaacgacaaagggaataactatcccaaagcacaccgtaattcttattggaaacaataaacggaacggaaactttggtgttgtattgaaacagctcctcatttttccccttgtagttgaattcatccgcctgatgctgccccaggccatagtaggcctcatcatcgcctgccgattggaacacttgccgaacggtatatcctttggtaccttccacttcgatcggggcaaaggttcttccgttgctgtcttccgccagaatcaggtttccggcagcatcggtaaaacgcacttcgccggttttctttgaaacgatggcacataattcggaggtcttcacacagacttcatccgcctgctcctccaccttaaacgctgttttatgctgccggggaatcagtatgagacttggttccttcgagaactctttctccggagtggccgatacgcggatgagcttctcgcccatcacctccaaccttaccttacgcacatccgcaggccgttgtcggcttacttctataatcacgccgttttccgtcttttgaagtccgcttccggcacatgcggcaagcatccatgcggcaagcaaataaactgaagtgtttttcaaattcatacgttactgttctttaaagtgatttttcttccggtgcaaagataagaagcctcttccggaacacacctcccggatgttgagacaaaaggtatcttttgatgcctttaaagataaaatgtttccggaatgggtatctgttgttatttgacccgatattaagaaaagaagtgaacgagatgccgtccgaaagatgatgagacctgcctgaaaacattcgccgccaacgggagaaaactctatcttagcgcttgcgatgtatatcttgcgccttgcgatatatatcttagcgcctgcgatatacatcgcaagcgctaagatagaactcttctcctaatctcttcctgtttcagacaaggcaaagagaggttttatccgctgatgaaaactctttcttgtacggatgaaacccatatccggaaccttatatcgaattccggttatttaccctctctctcctgatagacagagggcaaaacgccgaactcgtccctgaagtacttgctgaaatatttaggattattgaagccgagctgataggcaatctccgatacattccgctgactttcacgaagcagttgcgctgctctcttcaggcggatgatgcgaatgaactcgataggtgtcttgcccgtgatctgcgaaagctttttataaagatgcaccctgctcatccccagttcacggctcaactcttcgacagacaagtcgctgcggccgatgttggcttccacatacttgatggcatccgccaccaactgttcgtccaacgaggtgataactatccggctcggttcaggttcaatccgtaaacgctgtctgcgcttaccgtacaagtcaatcagtttacgcatgcgcagtatcagtacctccacattgaaaggtttcgtcacataatcgtccgccccgatagtcaggctttccactttatcttctaccgcttgcttggcagtgagcaatatgaccggaatattctcggtgcgtttgtcggttttcacccaacggcacagctcattgccatccatttcgggcatcatcacgtcacttacaatgatatccggctgcaaatccggtatcagccgccatgcctcccttccgttcgaagcggtctgtatgcggaaatagaggctcagactatccttcatgaaggccaccaagtcatcgctgtcatccacaaccagcaccaaaggctgttctttgtctccgccatcggtcgtatcgtccatatcatcggacaatgcttcgttttcttcgtccaaggcttgctctatttccgactcaacaaagactttctccgcctctttctttctgccggattcagaaacagccccttcccgaccgacctgcttgatagggatggtcacaagaaatacgcttccggcacccacattatccaatacctgcaccgtaccttcatgcagtgtcacaaaatcgtgcaccaggctcaagcctataccactgcccgtagactgaaggttcggatcaggatggtcgacctgatagaagcgctcgaagatgtgctctttatcttcatcctttattccggttcccgtatccgatactttcaacagtaacttatcgggttcacccttcaacacttccatcgaaacatccacccggcctccttcgggcgtgaacttgaaggcattggacagcaggttcatcaccaccttgcccattttatcttcatcaaacaacatgttcaaagactccacagccgaataaaaggtcagatgtatattcttcttctcagaaagcatcaggaaagatgcgcaaatatgccttacgaaagccactatatccccttcggcaggagtgagatgcagccccgccacttcactcttgcgaaaatcgagcaattggttcacgagattcaacagccgaagcgcattgcgatgcatcaacgtcaagcgtcccaattgtttgtcgtccgacacctctttcatcatgctttccagcggagatattatcagtatatatagtagaatactatactcattttaaaattctaaagtatatacctataactacgaagtgggaattgatctcttgggtatgggcgatattaattctgctcccatttattatatacatatatgtcaggtattataaacctcctaaattatcaaaccttaaattgatttatgagtccaagtcaaacattcgtttaattcttggacgtttattctatgtttgttattgtttgataacatggattggtttttttataattgtaggttgttttaagcattaatctctggaggttcaagcatcacaccaaagttctgatattatcccaaatgtactaacatcacaatgaaattctgttgtgcaaggtggatttgctacatttgaaggtgatattgaaagtgtaataaaagcaggaattgatattgtggtagtgtaataggttgaccgtccttattattgtgaaccaatgagagccagtccaatcataaaaaacatgactttagactgatgtcttttcttgttgactaccatattagttatattagttgatataatgcttctttattcttataattctcacatgaataatttaacatgaagttttctttatatgaaatcattagggtctcattcaaattgacttctcttatcgcaatcggaaactatcagggatttgatgtagatgtgcagcaagttttcttcgtgtagaaagtgctcttttttcaaattggatatttttcccataatatagcaataaataagcaattaatacatcgctttctgaaatgcaaatttattggcaacgtagtttttatattctgtctattgtttgtaaagcataaaaatgtatatttgcaacagacccaattgctctatatcaaaacaaatgaaagagaatggaatagctgtataaatacttacagccgaccttgggatattatcgtcaattcagaaaagaagaagtttatcgaaggctaaaataaaaatatttccttttactgatttttgcagatttatttttataacatactatataatagtgaaacagaaagaaaagaaagctcgaaataggaggacaaatgaacaaatagacaaggaggtaatatccgaacttgaaaagcttgtagctgaatatggttttggtaatgccaatttgagtgcattgatgaaagctgcaaacatagaagctaatgtgttttatagaagatacgcctcaatggaaaacctttacgacaggcttgccaagcagtatgatttctggatcaatgatactattgacgtttccagcctgaacatattgggacctaaaaagttttttgcggaaacattcaagaccctttataggaacttgtctgataacactgtaatgcaaaagttgttactttatgaaatgtcggttatcaatgaaacgacaaagagaacagcagaaacacgggatattatgaatctaaatttgattgcgttttatgacaatctgtttaaaccggcgaaaatcaatattaaagctattatggcgaatctgattggaggaatttattatctgatacttcataggaggtgtgcgaaaacctgtacaatagattttagtactcaaaaaggggaaaaggtctttttcgaatggatagattatctaacagataccatttttgacaaactggaagcgtatgaaaggaatagaaaagcagctcaagaaatgttatctgacggcataagtgagtttaaaatatgtaaatacatgggcatcaataaaaatgacttaaaaatgttactttcaaatagctatagaaattcacgagaactttcaaaggaaagctaaaaattttatttatagtacatatcatattgataagtagagaataccataaaatattcgcaaaactctattgtaaatccctattcggatactttgtattaatagcggtcattatctgtatggccgccgtgtgtatccatgaacatataagtgattatggacttaatagtctaatctggtcattggagcaaggggtatttgacgttagctattgtcggttacttttataattttttttctatatccctctgtataaggactgatagcctgctacaagaaaaatctgacacgctttgtgtagcgcgttacataaagtgcgtcaagttatttttcaaagggtacacgaacagacttgaaattgcggataatgatataactattcacagtttcaaggtagtctttggatcttagtcctgcatgtccgttctcctgttttattattccctgctttagcgttttctattccttttttatatacttctatttatcgcttttctgctgccgtgcaacctgccgtggattgaatttttccgcaaaggtaatcgccagtcccagtcgtgtcaatgccggcattcagccgcaagtgaagcgcaaaaatcttcctctccgctggtgagcgtatttttcctcttcagccttgccagattgttcctgccgcctttggatgcagaaaaaatcatcccggaggtcgcaaacaggccgaacagagggaaataaagaatatttataaactaaggtaacggtaggattaaccacctgccacaaaaagaatttattatgttatacgttcacacaattggtcgcattggcaaggattgccaggttattactggagcacacggttcattcattgcatttgatattgcggtagatgactattcacatggaaacagcatcactacttgggtaagggtacggagtaagaaagagaaccatattcgactatccgaatatcttaccaaaggacggttactgctcattgaggggacactgtcggcttcactgtggaaggataaggatgaaaactgtcagattcaactatccattacggcagacgcattggagttcatcaataccggaaagcgtgagggtacaacttcagaagcagagagtccgacagatgccgcaagtaatgtacctgtaccaccggtagctatgccgcaagaggacaaggaagacttgccattctgatgatgtgcatatagtattgaacaacaacaaatactaaatgtagtatttactaattatagtaaagtaggaagtttgtgagttacctattactgaaagtagtatttactacatttagtttattagtattttagtatagtagtaaatactaaaatactctttttagtaaaatagtatatactaattatagtatttactaagaatagtattatctttgtatcgcatataaagacatcaaattatgacaaaaattatagctgttttgaatcataagggtggggttggcaagacaactaccaccatcaatcttgccgctgctttgcgacagaagaaaaagcgtgtactggctatcgacatggacgggcaggcaaatcttacagaatcgtgtggtctctccattgaggaagaacaaacggtgtatggggcaatgagaggcgaatatcccttaccggttatcgaactggagaacggacttgctgttgtgccgtcctgtctcgacctgtcggcggcagaatccgaactgataaacgagccgggacgtgagttgatactgaaaggtctgattacgaagttgcttgacagtcggaagtttgactacatcctgattaattgtccaccttcactgggcttgctgacactcaatgcccttaccacagcggactttctgattattccggtgcaggcacaattcctcgccatgcgcggaatggcgaagattacaagcgtaattgagattgtcaaggaacgcctgaacccgaacctgagtattggtggcattgttattacccagtttgacaagcgcaagacactcaacaagagcgtagctgaaattatcaatgactctttctgtgacaaagtgttcaaaacgattgtacgggacaatgtggcactggccgaagctcctataaagggaaagaacgtctttgagtacaataagaactgcaatggagccaaagattatatggctttggcacaagaggttttgaaattaaaataagacaatatgggcaagagtgatttattgaaagacagtatgaaaagcggactggacggattgctgtcatccacgaagaaatctccgcaaaagaaggaagccacaccacttaaaactgaaaaagagcctgcggtacattgcaatttcgttatcgacaagagtgttcatacgcgtatgaaattccttgctattgagaagaatatgtcattgagagacattgtaaatgaggcgatgaaggagtatttggaaaaaaacggtaagtgagggtatgttcctcgcttcccgttcttttaaatctgtgacttctgttagtacgttatgccgatatgtattgctacatatcagtcattgacaaccctttgtatgacagggaataacctttgaactctcccgttgcacgcatgaaagcggctgctttcgcttccagtttttccatgtcgatattttcggccttgcgtttgacttcgaaaaatgtcgccgtatcgtccagttcgttttcagctactatgtctatttcgttctcacccttgcggtcccaccagcctccgatacgcgtatagacttgccgttctatcagtacacgcttaaagtaacgttcaagcatcagaccgctgaaagtttcataatcccgacctataatcatcttcacacttccatagttctctatctccagcatatagctgtacttgtagatgaagcggaaccagaacgtgaaaaaattatcctcgatgacataccggacattcttggcggaactcttctcgaacagcggttgcttcttcgatatgatttcgtattctttttccagcttggtaagataaccgccgatttccttgcctaccacgttttcaatttccgaacgggatgtttttcctcgtgcaatggccgatagtatggagaaatagattccgtaatccttgccgaactcttcgataagaatcgctttaccctcgcccaaaaatatggagtcggcctttataatctggtcgagcatagtcgttttggttgttgctcctgcatccacgagtagttgtacatacttcgccacaccgcccgtgaaagcgtacaaggccagcagatcttccgccgtgtagccggggttgtattccgaaagaatatctttcagaacagttggggtaaacggacgcacagtcataaagcgcgactgccggttatacaacggctctttcttatccttgaatatctttgtcatcatggaataaatcgaaccacagacaatcaggttaatacgggacttcgggctgtatagatcccagatgcgctgcatatcgctgaacaccgatttgttcacacggaaaaactcctggaactcgtcgataaagagtgtgatgggacgttctgccgaaagtttcatcaggtactcaaacacatcggtaaagtgttcggcccgccccatggttgggacccccaacttgttctctatttcaagccggtagtcctcacacaaatcgccttcggctttccgggcaacaaagaaatagagaatcggttcgtcctcgtatgctttccacacaagtgatgtcttaccgatacggcgacgtcccgttaccactgtaaactgagcattgtttttggccatttcgcgaatcttgcgaagaaaggctatttcttctgtcctgtcaaaaaatctcatatccttatccttttttattgctgtttccgaaacggctgtttccgaaacggctgtttcgttactgcaaaaataatgcaaatttctggtaaaacaggcaattgatacagatttatttagcgaaatggctcaaaggatttttatctggtaagttccattcctgttttacaccgtctggtcttacgtccttccgcttgtcccgttgtatcgttaatcatccctttatagttccatccgttttaccatccgcctttcagcgtattcttccttttctatattcttttaatgccactcatccggtccatttctgccatcgccggttggttttccagacgcaaaggtggactgccgcgcttgattccgtcgctttgaagtgcatttcctataaaattcttcctttctgcgaaagagtaattttccggaaaaagcgtcggaaatcgcttattcgtcagtccttgtaaagcatctgtaaatcccaagcggttcaggcagaaaagagaaccgaacaaagggaaaataagaaattaaatattaaaaccaattaaatttttatgattatggaagcaacagcaattcaatcagtagagaaaaacatcacaatggtagcattggcaaacgtgcagccgagcaattacaacccacgtaagaattttgacgaagcgagccttgcagaactttccgagagtattcgtcagcagggtgtgttacagcctattggagtacgcccaatagaagacaaccgctttgagattgtttttggagaacgccgatatcgtgcctccctcatggcaggattggaggacattccggctgtcgttatggaaatttcagacgaagttgccgaagaaatggcggtaactgaaaacctccagcgcaaggatgttaccccgatagaggaagcaaatgcctaccaaaagctcattgatagtggtcgccacgatgtgcagtctttggcggtgcagttcggtaaaaacgaaagctatatccgcacacgccttaaattcgtttccttaatgcccgaaatcgcacagcttttggaacaggacgaaatcacaatcagcgtagcgagcgaaatttgccgttatggggaagatattcagaaagaggtgtacaacaagcatcttaaagagggggtgcagtacaatagttggcgaggaatgaaagcctctgatgttgcacggaacatcgaacggcaatataccaccgacttggagcgatacgcatttgacaagaccctctgtctgtcgtgtcctcacaatacaaataatatgatgttattttgcgagggtggttgcggaaattgcgccaatcgtacttgccttgctgaaatgaatgcggcatatctcacggagaaagccgtgcgccttatggaagaacgccctgaggtatccctctgctatgaaagtttcaacagcaatgaagccgtagtagaacgtcttaccgccatgggttacgaagtggaaagccttaactattatgcaaaggcatatcccgaacagcccgaagcaccccgaaaagatgagtacgacaccaccgaagaatacgaacaggcacagagcgagttcgaacaggatttgaacgattacacggaagaatgcgaagaaatccgtacccgaagtgaagcaggtgaaatcatcctttatttccgtattgagagcaaggacatcgtactttgttatgttccgaaagttacctgtactaccaatgacacaaaacaggagcagacgctttcaccggtagagaagttggaaaagcaagacaaacgcaacaaggaaattgcccttgaaaagactgtagaggacacaaaaaaacagattttggaggttgatatgtccgattgcaagtttgggcaagacgaggacaagatgatttatttcttcttgctatcatccctccgcaaagagcatttcgaagcggtaggtatcgaggaaaaaaagccttattcctaccttacagatgaagaaaagataaacatcattgccaacctcacgagcaagcagaaagcgattattcgcagggattttctaattgctaatttcaagaacgcatacggcaacaatgccattgcatccctcttgcttgacttcgcacaaaaacatatgcccgacctgttggcagacatcaagaacggacataatgaagtgtatgagaagcgtcaccaacgtatcgaagagaaaaaagccgttcttttggtgcaggaacaagcaaagcaggaagctgagcaatctgacaaacagcaatccgaagtagggatgcagaccgaagaacagccacaagaggaaaatattgcagcttaaccataatcagaaccaacgaatagagggtagagtaatctgtcctctattcgttcctaatttgtaattagattacaattaaggtgaagatgttcacggacaactgctccaaaccgttgtcgggcgcgtctgccgggcaaacccgccatccgcgcgattatgccttttctatcccatttatagctacctcccgataccccgccgccacccgtctccatttatacctatcagtttcctcctttttatcttttccatcttattccttctccggttccttcctgtcctcgccggttggttttccagacgcgaaggtggactgccgcgcttgattccatcgctttgaagtgcatttttataaaattcttcctttctgtgaaagagtaattttccaaaaaaagcgttggaaatagcttgttcgtcagtcctgtaaagcatctgtaaatcccaagcggttcagacagaatatagaaccgaacagagggaagaaaaataaatcattaaaatttcatgacaatggacaacatcaaagaaagcaaagagtacaaacttgccaaagaatgggaaatggcagtgaatagttttagtttcaatcccaagcgttttgcagccgctatacctgatatgcaccccacactgcaacagagcctctatagattgtttaaggagtgcatcattgtgatggcggatgagacacgtcgctatgatgaccgcaatcgtgcatcacatgaagaagcaaagtgtcttatggaatacctcaagacaaatggaaagcatatcccattaaaataacaagcgtatgaaaacacaagaagtacaatttggcggcaataactatccttgccgtgtggtggaatccaacgagggtgaagaactccttatcggctcgattaccttgcttgatgcccttcagcccggtagtttcaacgatgaaaacgaaggcttcgcaagcaaggaagccgaaagaatctatgacgaggttttcttctttaccgacatggcaaacctgcgactgacagacgtagaattggttgccgaactgaaaaaggacaacccggaatggttcgaataaaaaaacaataatcatcttaaaaatagcatagttatggaaaaagagtatgtaatacaaatagcacagaccattcaagagcagttgataggacttacccctatgcccgtcctcatgtcatgggatatcgcagagtttgcagccaccatcttcaaaggcctgcctgcacttcgtatcaaagtaaacggactgttacacaccggatacgtcattattgcacttaatgggtcggactattatgaggtatatctgttgaaaggcaaagatgcagagtgtgtcaatgaagaagtttgttacaacgagttaggggatgtcattgacagggcaattgaatgcggtactgacaaagaggaatacgaaaaaattgccatcagcaactcacccaattattaagcaggtaactctcctgataaaccagaagaagagattagttagtagtaaaccgccagtacgattgtactgacggtttttgttgtttttatttacattatatgtcagacagccggatttttatttcgcgttgcgcttattctgaacgtcttttatcatctctttcacatcttgccccacttgtacgaagtttttatataggatgcgctcccgttcctctctcgacttgaaagtgtagaacttcggcagcggcacatacgccgcttcttctttcttgatttctgccatatcaaaatctgttttgcagaagaactttgtagtcttgaactcttccgattcttgaatattcattgaaccgcccatacctgttttcgtcttcacaaagtcccgtgccgtctgaccgcatatccatccggttgccatatccgagattttcgaggcaggcacaaggttatccatattctcattgagattgatacttgttttgtcccggtcaatagtcacgccttttttgacttggaccaccttgccgaagatgtcgttggacaaccattccagcgtttctttggcacgtgccgagccgcttaccacattacctaccgtcgtaatgatcttttgcatacctaccttaccataatcggcttccagttgcggtagttcctgaaagccgagcgttacactcaccttattgcttcgcgccgtacctatcagacggtctattttgtgaaagtaaagtgtcggtaactcgtccactataatactcacaggaatatttttcccctgcccggtattcacacgggtaacgagacggtttaggataagagcgttcaatgcaccgatgatggattccatttccgggtcatttgcaatcagcaggtaactcggattcttcgggtcactcaccttcaggtcgaagtcatcgccatcccggtggaatatccagtagctctctttggttgccagacgcgaggtataaacacgtaacgtgccaatcataccctccaattgttccattgccttatttttgaaagctgtctggaatgggccaagcagcggagcaacctcattgtcagtttccagtacctcgaaaatcgtctgataactttcattcaagaatgacagaatatgtggcatgtccgaatactttcccagccagtaggccggttccacgatattgccgccttcacggtcacgcacgatacctgtcggtttccagaatttggtctgcggatcttgctgtctttccgcatatagaggcttgccgttggcatcgtagggttcacgttcataattcacgaagaagtagatacaagcggcaaggaagtttaccgccgaggtttggaagaactggtcgcttccgccgcctccctctttcttacccttttgtaggctttccaataatgtttccgccgtttcgctggccgccgcaagattgttgatgtactttgcctgaattggattcacccgacggctgtactccacatccacaaaattaatcatgttgaacttgcacccttggggtactctgcccagtttctcgttcttcttgtaatggtagtagagcttggtcgccaatgtaggaaacttgtagtcatacaccaccatggcgaaacctttggccgaatgctgtcggataaacggctctatgatactgaaagtcttacccgatcccggtgttccaactacccatgttcctcgaaagcagttgcttacagaaatccaccccttacggaatttacccttatagtagtatcgcatggggatatttacgctgtattcattctcgactttttcttcacattgttcaaaactttcattctcgaagttgaaacggtctttcatcaatccctccttgatgaactttgaaatgttgtctaatgcgatatgtaccagtactacgccagcaatggaggcaatcatatagagaatgatattcagaggtaaggtataaagccttgtttccatcgtatggccgaacagccatacggagagtacgagcagcaataacccactcgtcaatggatacaccacctgccggcgtgcgttgaactccagatgcttcttgttccgcgttccgacacaagtgatgcagataagcagtaccgttgcgattttgctgtacacaagattgccgtcgtggtaaatcatccattgtttgatgcgtccgtgaatgtcggtcagtatgccgccccagtggtcgagcattgcagggtcaatggcatattcaaagaactccagcagcacggacacatataccactgtgcggaatattttatagaacccttgcaattccttactttcttccataagtcagtctgttattagtccttgttttctacgataccaatgattacctactctgattacatccataccgaaccatgcaccattctcgttcagttttgtttttatcttatcaagtgttaccggaccgataccccagatttccatgagatattgctcgttaagatgaatcaggtctccgatatataatattccatgagattcaagatggcttttgatggatggggtaatacccaaactgaataccggttccgagagatagtgtacttcttctgcctgaatgttattcagggctatttcaagccccactttgattcttttgagagaatcaaggcgttcttgcatcttttggatgacaagctcgtcttgctgtatctcattgcgtaattgggttgctctctttacaagttcggcattacttcttttcaactctccgttaatatccgccattgacagattacttgtttcaagctcgtttcgtgtgcggtctaattgcgtgacaagttcctccagtctgtcggcatgacgcttcaagattgaatttttttcattatcggcagtcatttcgtccaaaaggtagccgaaccttttaatttgaaaattaatatcttctttatccgatgctatggaatctgcgagttttgccagtatttgtcggcatgaattacctttcatggacttatacatgaggacaattcccaatatcatcaatgctatgctgaaaaatatatccgtatctttcatatctttctatcttttattcgtttatggtaattatggggcgtactctgtgcgcctgtactttaggtgtttcctgcattgcaccgctccccatggaatagagccatgccttggctgtctgttgcttttcgacttctgtggatgtccagtaccaacagtcgttttcatccagtggtaacggctcaccgccacattgttcgatgacagggttgattatctttcgcatggtgtagagcagccgcatctctgccacggacggtacataggcactctgcccgtaccgccataggtcgaaaaccgcttctgccattggcgaagcggtttcttgtgtatcatacagtgcgaatgtattctcattgccatcataagccatgatgtcagccgatgtgccttgtgcgatgccgaggctgtcggcgaatgcctgtggagcaatgtcccacaggtaaactgcatacccgtccccctccgtatctccgcgtttttcggtatcgaagaccaccgctatcgcttttttccccgattgttcatattgtgcgtaaggcaaggctgttccatcctcgcagaggatatgtcctggacgaactgctgtatcgggtacgtctatatgcgtgtcacaggcagcgcaaagcacggcagccgttgccgctgccaccaaatgtatctttcgtatcatattgctttcttttttgtttccctattttataggtagtttcacacccagcacgacacctgctcgcagcacgtccgcaccttttatcatcacatcgcttttcacttgccaatacagtgtccatccggcccgtagcacatagttgtgttcgtaaccgaagtgcaggccaccgaggaacttattcatgtcgcttccggctgaagctccgatacgcagactgccatagtggttgcgtccccgcgtcatgcacggcttgtaggccacgccaaaaccgtagctgcggtagtttcgccaaaatgattccgggcagatatgcccgcacgaagcgcactctgcccattgtagatagccgttgacgaagaactcccacatatggcgatagttcatttcgtgttcgtaggcgagcgttatatccatgccgttcttgtagagtagccctgtgccaagcgagaggcgtccgctaccttgttgtgcatttgcacttgcagcgatacacacgcaggtaattatcacgatgattgtctttttcatagtcattcctcctccaataaatctgcatggaacgaatctgccgccagtatatcctcatagtcgatgttcagactgatgttacggccactaatctgtttctccgtcatttcgatggtcagtagcttgtcattgggaaaggtcatctttttcacgacaatcacattccgatagccgtgtctgaatgtcttgcccgattccagaaccagggctggtgtcagttcgatagtctgtgcgttggttgccttggcgagtttcttgtctgtcagctttatccgtatctcatcaatgtcaaaacggatgttcgtcttgttctcgatggaaaagtctatgaagaagtagtcacccaccgagtagatattgttcagacgcatcaccatgcggtgtgctttggtagctacgttgcggatttttgcaggtgagttccagatgcgccgtgcatgatgtgtcatgtcggcagtggacattgagactgccggattgttgtacgcattacgctcttgtagcaatatctccttatccgttactgcctctttcatccttgtggtataaatcagtgcgtattgtgtgcggtatcgttccgtcacaatggtgacgatggcgagtatttcaccatcctcgtgtccgctttccttgggctttaggcgaatgatgttgtcaatgggctgatcgcccgccaccttgtcagtggaaatatccacgaaacgcaccggttccgatgccgtgatgacagttgttatctgttcgttcaccgtcagttgttccatttcttcgtaggtagtttgtgcgttagctttcggtaaaatggaaatacctgatagaagcataatgccaaataaattccttttcattgaaatacagagttataattgaaaattcatgattgctttattctcttgcgaattgatatttgccttatctgggatgtcatcctgcatacaacttggagatttgtccgtaacatctatctgttcgaatatgatttgtttcggaagtattttatggcagaaatagctgctgttgaacggtacgtttttcccttttccgaactgaatacgtttatcgaacatgagtaattccagatcagtattctggaaaagtcggcagggtgctacgttgttcagccaatagttggacatcagcaaggcgaatggttttccgagtttcagacagcgttcaaagacttccaccttccggctgaaaggaggattggatacgagtatatcccattgggacggttcatagttgaaaaaatcctgtccgttatagatatgggaatacacgacatggaaaccggcatccttgaatttctgcacaaactcactgtgcttcgtatcgaaaggacaccagactatcttgccttcaggtatatatttgataatgggtaatacaccatatcccggtgtatatttttcatctgtcggattcccgtataatttttttaagtagtttgaagatttcataggcacatgattaaaaatatttatattgatttcttttccctatttcgcttcatttctttatctgcctggcacgcgcccaagtacaacgtcccgtccgggtcatttggatttcacattgccaaagagtgcccttctccactgttctgaaattaacattcccgtatcttggtccgtaaaaaccggtatgtttttgaaaagcgaataaggcaatcctccgtctgtcttctgttcggaagttgcatattagggcaaactgccctctgtgatgccaccattcggtactcacaagttttccgataaatgtttcggctttatttggggctatatagtccgcataataaagcccatccgtacctttgtgatattctgataaatctgtttccatgtcatcatcgttttaattccttttttcctgtccgttcactaaatacacgaaagttccgtatttcaacttgactttgtttttcttgatagctttgctaatggcattgcttgttttctggtaggcattgttcaccgcctgcatcccccattgtgcaaggctgtttcctgttgtacttcccatactcatgttcatattgcccgacattgccccgcttgctacatccttgctcgtttcccggaattggctgttgggcacatacagcccctccatgccatctgtatcatagagtgaaagactcactttcaccaattcgtcattcacgaggatgctactgatattacctttcacgcgcccggatgagaatccgcttaccgtagcgtacaggtacgttcctcttgctatcacacactcgccaatctccacatcgtcaagcaggcgcaacctcacgcgcgagccgtccaccgctttgatgttctcgtcaatgatggcttggatgagtttcggttcacggacattcttcgacagtgtgttaaagtagtccgaggttgtcttcaccttgcgtaccacctcgctgggcggttcgtccgctgatggcgttttcacagcccggctctcttcgttgatggttccggaggctgctgctccttgtggtggagcaatgttggccgtgtccgtttctgccgggggtacagtcgcgttttgccctctcagtctcgcctctgcgagtgctttttccagttcggcaagtgcttcctgttctcgtgtcttggcagaggcaatttccgctgccgcagctttttcctgttgttcttccgtgagcaggtcgatgtcgtcctgcgtgtatttcgattcatactcttccttgtttttatcgggttcttcccggtctatgttatctacagcggagtagtcttgtatcttaccccatgattttgccatattctcgtatttgctgcctatgccatcgtccttgatctgtgcccccggcaattcggggttcaggaactccgtcgtctgcaacgccttgtcttgtatttctatcgtttctgtctgaaacaggtcgaagatgaaataagacgtgccgagcagggggaaataaaggatggcgggaagcatatatttcggctggcgaaaattgattttctccaatatcttcattatacatcttttaattgagttgtacatatttgccttcaatggcacaatttctcagtatctctgcgttgtcttctccgaaagctaataggatgctaccgcgactgggagagtcacctcgtgctccgtctggtcggtagaatcggatgcggtggcgtaggaatttcattcccgtcgcttttgggaagatgacgtcctgaaacattttggaatcgcaacggttgaataataatgcaatgccgttgccatgttctgccaatttccggacgaatagctcgataagaggacgcgaatagggaggattgagccacacacgcccttcccatatctgggacaacccatctatgttctggtcatacatgacctcggcagtcggccacaacggacggatgggagcgcaagggtcaaggtcgaatttgcccaatgcgtccagtatctcctttggcgtgtaccattcgtctgacgaacggactgatttttcaagccgtgtattcataagtattcttttattgtggtttgtcccctctgtttttatgttcccttatttcgacttcctgcaacagcttgtgccgttcccgaagcacagaatcctgcatttccgtcgccgtgcaacttgccggactgtgtctgtacacagttaccaagcggtaggcgttccatacgaaagctccgatgacgaatgtaaagacgatgaccagaaacagcgtccggtgtgcgttggcaaagccctgcaccttggccgccgcttggtcgatgcgtgtcgccttggcgaatttatgcccggcctgcacctctcgctcgtagcgttccttgtactgcgggtcatctttgtccggcatcttctcgccgaacaacatccgtttgaatcctttgatattcatatctttggtgatttaatagttactctttgttttttgctcgatatctttgttcagcaatgtgcgccagtttactatgagcagtccatgcggattgttgtccgttctcggcacacgtttaagttgccctgccgtaaccagttcgcgcatcaggatattactccggcgctcgattcgctgccgaccatagtaggtgaactccatattctttttgtcaaaggagatactgtcacagaatatcgagaacaccgcgctcgtacccaatatattggagtaaaatcccttttccttgagggtattgtactgtgccagtcccgtctcatcgaccaggtacatcgctttttccatcgtatagcggatgtatttgtcgtccggtgcgagagtaaaaaagtaatggtgaaacatttctacgtggctcttggcctccacgtccagtgtttcgtccatcgtcgtgcgggttacgagtataggtacatttccgtccagcacatacacctttttctgcgcgtccgtcaccattgtccgggcagtccagatacttgatacgctgatgatgatacaccctgcaagaaaagcagtgcagatgatgcccaccagtcggattttattctccaaatgtttgatgaccatatacctctattttttcttgttagacaatcgtgtgtattcgtcatgtaacattgtcatgactgtatcatgcaactccgtcagaaatttttcgaacttcccgtcaaaaagctgtgtgtaatcttcccgcatgattacatgcacgaatatccaccagacacggcggtttcgattcttggcatttttctgcaatttgaccagttgcagacgataggtaaggtaagtcatcatagggacaatatatcggttgtcccatgtaatggcttcgtccagttcttcatattccggatcaattcggtggttaggtgcataaacgagttcttcgcttatgcgttcatttgcatagtgcacgaaacgctcgttcctgcaccatttctcaattttctgttgtacattcatcttttggatatttaatattaggtttatcattatctcatcatcgagccgataccgcccgtagccgtcattttggcctgctgcgccacaccttctccaaagttccgtgtagagaaggccgtgtcgccttcaggtatcatccatgctgccaagtccggcacgaggtttaggcatttcagtgccacgatacttgccgccatcaagtagccggcggagaagaagctgttttgcaagtaggccgccattgtctgttcgcttgctgtgattgccgtcaggttttctacctgtatgcacagtacaatgtcgaataacagtagcacatagaagccgacgaagtagagcattgcaccatagaaatgtactgtcagataccttataagccacttcgcccatgcaccttcccatttgggcaacagcgagaacgcccattgtataggtccgaatattgttaacatgcccagtaggatttgctggcaatagatggtcgcccactatccaccatttatattcagtgaaatcttgttttatatataatctttgtatatcagttatttgcaggtgttttcatttggtttgaaaactcacgaaattccacggttttagaaattattggtactatttgatactatatttcgggatatattttgtacctttgcaccatgtaaccaaaggatatatcgcgtatggatttcatcttcatcaaatcatccaaggcagggaaagaagacttcggttctatctatgcccgtgtgcgtacaggcaaggctaacattaaagtcgtgaccggattcaccatcaagcagcttgaatgggaaaagtaccgttccctgcaatacgcctcttcagccctgatgtcgagcatcgggataaagtacgggcagttcgcccaagtcctcgcaagagtaaaggcggcgtttgaggcagacgacttcaaccccaaggaagccaagaacatcatcgagagcgtgaaacatgatgtacttaacgggatgatgcagattgtggaggtcaagcccaaaggcaagatgctattcgaggatttccttacctcttatatagaagatatggaaacaggacggcgcaccaagaaaggacgtaccgttaaagtttcggcagcttacctgaaaggtctgcgcttgattttaggccaaatccgcaatttccaaaaggaaatccatcgcaaactcggattggatgacatgacgatggaaacacgcaacagccttgtcggttactggaaagaacggggtctgatgcctaacgccatcaattcgtacatgacagatgtacgcacggtggcaaaggcagcctacgaggacaagctgaccaaatgcgatgatttccgacattcggatttcgtgccgaaaaaggaggaagtggataatatctaccttacaccggggcagatacaggaaatgcttgaactcgacctttcctccaaagaatcggttatagagaaatggaagtctctggatatagacgaagatgaaaagcagttgcagatttccaaatgccgcatcacgcatatcaggacattggaacatgtaagggatgtgttcattgtgggttgtttgaccgggcagcgtgtttccgactattcaaggatatgcgaggacatgataacggaaatcggtggcacggagttcatactcataacccaacagaaaacggaaaagaaggtctatatcccggttgacagacgggtgagagccattcttgacaaatatgacggcaagttgccaccgattcatcccaatgaaatgaacaagttgataaaagccataggtctgttgcttggctggactcacgattgcggctttgacgagaaacgtctcaatcccaaacgtggacggaggttctgtgacatgctcctttcacatacagcccgaagaagctttgccaccaacgcatacaaggcaggtgttccattgccttccattcaagccatcacgggacacagcagcgaagcgcaactgcgccgctacctgaaattggatgcggaggaaaaagcagtcatagcgttaaaggacttcaaaggtattattgaattataaggagggtgttatggaaaaatcaagattcgatgccatcagcgacctgttcaagctgtcaaacatcatcagtgacagcctgaaacttgcggaatcgcttgcaggcaggagtttcgataatggcgaaacggacaacaaggaaatttgcaggaacatcaaatatggtctgaagaccctgccttttcttttggacggcatcagggaatatatagccgaacacgaggacaaggggctggcgcaaaaattcgtcgggctgcacggcgacacgaagcggcttcacgacctttgttcaaaatatgatgacttgaacaaggcggctttccgtacaggtgtagcctacctgagcatggaagccatagggcaatacttcttccccgaaaatgaactgtcggaagcgtccaatgccattggttctgttcccaagccaatgacacgctccgaagccaccgattgcatcgacattatcaatgccgccatacggaaatgtgcggaggctacggacgagaacaaagggaaagaaatgtttgccatgcttgccaaagtggatagagaaaaaatccggtctgtcaaagactatatcgtcaatgccaacgacaaggatttggcaaagctctttacggaacactttgcagaagccgtccgtctttccatgctgccccaaaatgcgaatatcaaagcgcagtcagccggaataaagatgttccatatcgctttgacgatgggatatgtcaaaagaaatgtgctgcatgaaggcacatccaagccaacaggcccttgtaaggaagatgtatcatccggttttaccgccaccgatacggtgcacggcggagcgttccatacgaccgcccaagttcctgttatgaggctgtattgcttcctcgccacctttaccgtgcagagcgggcccgacaagggcaagcccgtactggacggcaatgccgtttccgacagggatttcatccatgccgtcatgcgtggcgactattccaagatatacggcaactgcgtgagaggcaagatgcgctgtgtcgccaccctgctctccaaagcctatttcaaggactggaaaggatacaggtctgccgcagcctgttctatggggctgacccccgaaagcctcgccaagtataacgtggagaaagcctttatagcgaagctcaaggagttgcttcccatgataaaatagtgacataatccacaggtgggtacaactcaccacaacccaccgccttgcacaagccgttaagcaccagttgtttgacggctctttttatgccctttcatttcacagaatcccacaaattcacgggctacattcctgccgtacctttgcctccacaaacttaaaatcaacggattatggcagataagacagaaatggtactggtatcgcgcgatgagctgcaacagcttatcggtgcaagcgtgaggtgcgcgtttgaggaataccagcaggtacaggcaccacaggacacatcggagtattacaccatccggcaactggctgagaaatggggcgtgagcatagcgaccatctggaggcacgagaaactgggtcacatcaaggggcagcgtatcgggcggcgcgtcctgtttccaaaagagcagataggccgcatcaagagcctgaaagccaccagcagggatgcggataaaaataccaaaggataatttgtagaacgcacaacaaaaatcattcgggattatgaagaatttgaaacagcttgttttgccgtgctacaaattggaaatggcaatgacggtggaagcatggtacttcctgcacggcagtacggacggagtatgcaacctgaccttttttatttccctcctgtcaaagatgacggtttcggaagtggtgaataccaaacggggattgagctatgccctccatcccggacaagcggacagctccatgctggtactggccaaggaatggggcatcgggcgcaaggcggtttcccgtctgttggaggacttttcggaacgcgggcttatccgtgttgattccaatcctgtaacatccattatagatatggtgtgcgtgaagtcgtggatgattgccgggcggctcatcgagaatccaacacaccatcagacggtcaaggcatacgaaggggtcaggatattcctgtttaacggtcaaagactggagacattgcgccgcagttcaccgaggaagagaaaggggaagccgtcaggggaaacggaaacagcagcccctacaataataacggctaccgagtgcgttacggaaaacacagctacagatgccgacggcacacctgttttagaggatggcaatgccttacccgactcgcaggactggaaacaggaacaggaataaagcggcaggaacgatacgcgacagcgttttaggagagatattttttagggctggcaagttaatgttttcgtccacgaaaaccacgccaccaacggcgaacccaccgcacgggaaacggcaagcacggattacaagccctaaaaaacagaacattaacagataaaataaaaacggatatgacatatcaggaaaacaggaacaagggaggccgccctaaggcggtaaagggcaaggcgcggactaagaccatttccacgaggctcacgcttgccgaatggaaggcggtcatgcggaggataaccgatgccgggaagaagccgtcacacttcttgcgcgaactgttgctgtacggcaaggttgtggcggcaaggacacaggaggacaggcagcagataaggatgctggagggagggtgcaacaacctgaaccagttggcgaagatggcacatcagcaaggcttccccggaacgaaaagcaaaatcatggctttgctggacgagttcaacaaaatcatcacgaggatatgatgggcgatttgaaaaaacgggcgagtttcgcacgattggtaaactatgtaaacaacccgaagaaggcacggctcatcgacagcaaggatgtgaggcttgacgacaacgctgccattgcaagaagtatgcagggacaggcggatgacaagccggggcgcaggctgaaaaatcccgtgtaccacatatcactggacttcgcccacgaggacacacccaggcttacggacgacatgatggctgaaatcgcccgtgaatatatgcggcgtatggggataacggacacccaatatatcgtgtgccgtcataccgataaggaacaccagcacctgcacatcgtggccaacagggtggacaataacgggaacaccatcagcgaccgtaacgatgccgtgcggaacgtggctgtatgcaaaaccctcacaagggagtacggcctgcacttcgccaaaggaaaggaaaaagtgaagcgtgaccgtctgcgtggtaaggacaaggtgaaataccagatatatgataccgtcaaagcggctataccccgttgtaacagttgggcggatttgtgcgacagactggcaggacaaggtatcggggtgcgtttcaaatatgacaaaagtaaaggcgaaatcgttggcgtatcgtttaccaaggacggagtctcattcagtggctcacggatagaccggagtatgggcttttataggttggacaaacagctcagaagccgtattgccgagggaatgaaatggcaaccacgtttaccggacaatggtgttgatgaacggttgcagccaaccctgcaggatatggcaataggcaatcatgcagcgcacactcttatagggcaaccgtcaccaatcggaacggaagcagacagcagcggtgatagtcctattgaatccggttctgacatcgtacaagtaaccattgctgcactcatggagctgtgcgtacagccacatcaagccaaggtttcatccggtggcggaggtggaggaaacgaaagcggctggggagagagcgataacgaaaaagacaaacttaaaccaagaaggagaagaagatgaacgacaaacagaatatagccgaccttataggggctttggcggaagacatcgaggaaatcaagaagaaactggatgtaaagaatggctcagacaaggacgaggcactaaaaagactggctgtaaagctggagcctgttatacgtttctttggtggcaatgcacctgaaaacataagcggaattttcggcagcaaggaagccatagagaaatccaagaaatcactgtgtgatggagtgattacaagtctggaggtatttacagataccaccaacgaggatatgcgtaagcgcggtattcctactatcaaggatttgcttcataagatattggaaatgcaggcggaacttttgaagaatagtaagcaatcttcggaaaagttgcagccaaaccaaggctgtataccgaaactttggctggctatttgtccgggcaagatactacacgcaataaggcggctatggggcaaagtccctgatggctggcacaagaatccttatacgtggactggcatcggttgtacgctcgtattctttaccctgtttaccgtcagttgggtacgatggcatgaatactgggatgaaaacagacggctgaaaacggttgccgacaagtaccaagttactttggttatgctcaatgaattacatccgaaattagcgataactgttggagcatacgaaaagctggttgaaacagtcggagtggattccacgctggccgtcttcaaccgacaggtcaagacagtgaaagaaaaggagaaaaaatccgagcagagataaaagttattgagggtgtatcacagtgaatgatgcaccctcaataatgttgtaatcaaacgttactgattttcgtcatccgaatccgcataaagttcacattggcgaataactgtttcaagtgcagcttcctgttcttcgggtgggtatttatactttttgagtagtcgcttcaccatggaacgcatcttggcacgagccgattctttctgtcgccaatcaattgttttactactacgcagggcttcggtcagttctttggccatagctaccagttggtcgttttcgtagaagtcacggacggcttgcggtttcgtcaaggcatcgtaaaacgcttgttcttcctcgttcagccccaattcagacgcttgttccgcattggtcctcaattcctccgccattttcagcaattctttaattacttcctcgttggaaatcaagccgcgcaagtattcggcaagtcgagcatcgagcatttcgctgaatttctcggcttcgaccattctctttttagcgtgcttcttgatatgttcttcgagtagccgtttgagtagttcgagggcgaagtttttctctttcatttcggctatctcttttaagaagttctcatcgaaaagagaaaactcagagcctttggtgttgagtatttctatcacaccgtctgccttgattgccactttgagcaactgcgtaatgcgctcgtctatgatttttcgggtaatcttcttattgcccgacagacgcaagagcaatgtcctcaccgcttcaaaataggcttcttcgtagcgttcagcaggagtcagcaaactgcgacaaagcgaagcggcttgcgccaagcgtttgctttcttccatgaagactttctgcgcttcggctggaacggcatccactaaaatgatgttgccgttttcgtcggtttgtgtggtagattctgatgaaacaaggttatttttgtcgagcaacacgttgacaccgcctctgatgaggttcgcacgttgcaagttggaacaatcggaaaaggcggaataatcgtaaccgtccatacattcacggcaacgattgagggcagcgacaaattgctggtatgcggtggtcttgatattcgggtcgccaaagcgtttcttgtcgcgcccggtatagtcgtgcatggcttttttcagagccttggcaatgccgatgtaatccaccaccaaaccgccgctcttttcggggaatacacggtttactcgtgcaatggcttgcatgaggttatgccccttcatcggtttgtaaacgtacatggtggcaagtgagggcacatcaaagccagtgagccacatatccaccacaatagcgattttgagcggtgagttgttgtccttgaattggcgagccaactcctcttttcgtgcgcccgacccgatgatgtcgttccattccacggggtcttggttgccttgggtcatcaccactccgataatgtctttccactgggggcgaagctctaccagctttttgtagatgtctatgcccgtggcacggtctatcgccacaatcatagccttacctgtaagcaggtcggcgcggttgttttcgtagtggtcgatgatgtcccggcaaagcgtgtcgatagtctgcggagctgacagcagggcatgaagccgtgcgttttcatctttggagcgtttgatgtcttgttcttccgctccttcttccgccagtttgtcgtactcgtcatcaagcaaacggagtgtattttcgtccaaatccaatttcaccagacggctctcgtaatagacgggcacggttgcaccgtcttcaacagcttgggtcatgtcatagatgtcgatgtagttgccgaaaacctccctcgtgtcgttgtcgtcttgttcgataggcgtacctgtaaaaccgatgaacgccgcattgggcagaagtttacgcacgatagccgcaaagccgagttttagctcacccgtttccgtgtcaaccttagttttggtgtttgattgtgtgcggtgggcttcatcgctaatcacaatcacatcggagcggttggtgataagttgttcgcggtctttgaacttttggatattggcaaagatgatgccgtggctcttgcgcttttcaagtagttcgtaaaggtgttcgccatcggtagccttgacgggcttttggcgcaggtagtcgctgcaagcggcaaaggtactgtgcagctggtcattcaggtcaaggcggtcggtcagcacaagcagggttgcactcaacaaattcttcaggagttggtgagcatagaacaccatcgaaaggcttttgcccgaaccttgcgtgtgccagaacacaccgattttgccgtcattgcgttgcagggctttcttagtgcagtcgagggctttctttacggcaaaatattggtggtagccagccagtatgcgtgcctttttatccacacccatagtaagggtaaagtcggcgataatatctataaaccgatgcttggcgaagatgccgttgaaaaaagtttcaaagtcggcaaatgccgtactctcataacttccgtccgtggttttccactccatatatcggtcgagtggagcggtaatagtgcctacacgggtgtctgccatatcgcttatcacaagcatttgacaagcggtaaagagttgcggaacgatgcgcatatagttctgcaactgctggtgggcttcctctgagttggtgatttcgcgcgagggcgatttcagctcgataacagagacgggcagaccgttaaggaataccacgatgtcagctcgtttggtggattttccattaactaccgtccactggttcactaccataaatcggttgttgtcaatgttggcggtgtccattatcttgatatggtcgctgcgaagcgtgccttgggtggtcttgaacgtaacgtccaacccgttttgcagccagtcggtaaaagtaacatttgcgcttactaacggctgactgaacaactcgcgtatttggcggattgcttcatctacggcagcggttttgtcagctccgttgatagccaacattgctttgcgcaatactcccggtatggtagcatcggtaagctctcgcccggtgtcggcttcaaggtcaggaccataatgatattcatagcccatctccttgaacaaagagattatcgattgctcgtatgaatcttctgtaaaatggaatgtattaagcataataggttgggattaaattatcatttatacggcggttcagctcgattttattgtcgagggaagaaagaatagaaactatcctattttgtacatcaacgttaggaatgtcaatttcaaatttactgagagcatctatcgttaatgctttttgagttgaaccaatagcctttgcgtctattgcgttttttgccataggagacaaaaaccaatagtataagaatttactattgagtcccttaaagttaccaaaccatgttaggtttccatccttaaaataaaaggtttcatctttaacgacatacggaacgcctaatgttccaacagacgttaagagcatatccccttcttctggaactccgaatttgtttttgatttcattatatcttgcttctgaaatataaagctcagtagaaacattttctcctttctgcttttcaataacctctttgcctctataaaaaggaattcctgaagtttgatattctttcgcaaaaatccttttgcttgatgaaatcgagcaaaggtcacctattttatattgtttccattgttccataaatgagaatttagctgtttaaatcgttcgtttttacttcccaaaagccgttccttttgccgtttttacgctcaatgatgcctttttcggtcaaatttacggtaatggtcttaactgttctctcagatttgcctatatgcgcagcgatttctttttgcgtagctttaggctgttctcgcaagaagttcagcacggcaatttcttctaaagtgcaactcaaagtgcaaatattgcactttggagaggtttcttttgtcgtgtttgcactttgagtgtcttgggcagaaagttcttgcacaagcattgctcggttcttcagttcgttatgctcggaaagaatgaggtttctaaagaacgcttcaatatattcggtagtagcataaattcctttgcttaagttgttataatttgctcgaaccaaagcgttgcggaaataccaagaatgattggcaaacgcctcattactgatgtcgaagccaaacgtgcgcagatatttgattgtaaacacagccgttgtacgggtattcccctctccgaaagcgtgaatctgccaaaccccggaaataaacttggcgatgtgtgtgatagcatcgttgatgttcaaatccttgtagctaaaattcttttcctgcataaaatcgtaatcgagcgtttctcgtatgctgtcagcactggcataaagtacggtttcgcctttcagcacccattcctttttggtgatattataatctctgacctttcctgcaaatttatagatgccttggaataggcggcgatgaatggtgatatactcaacaggcgaaaatgtaaaagttttctctgatagtatttcggcaatacgagctgaaactttatcggcttcttccgttctgtcttcaatgtcagccctaatggtttttgattgataataactatctataagttgtttggcttcttcaatagttatatcgccctcaatatgctggcgtgccgtttgtatcagatactctgaaggcttcaaatcgtccaccgcctgcaatccgatggctgtttgccaagcatagcctttttctcttttctgaggctcaccttgtcttatatattcttcaaagtcattcatcattcaatgcttttagctgtttaaatcgttgattttcagttcgcccgacattagtttcggaagaagtgtatcgcgaaggctaataagcctgtcattttcttgtaataactctgccatccgcttataataagaggcaagtacctcatccatcatttttgattcagaatcggacggttttcttatctcaaaatcaggcaatgctttcttgctaagatgaagtacggtcgttccgtttacatacccaaggctatgccccttaaatagcttatttcttagcattgctgcaagtaaaaacctataagggaatgtttctttgggtaggacttttaccaagtccattgagaagataatgctatcatatttaccacaagtaagtaataattcagcattaccaatcacatctgcattttgggtaaggtcggtatgcgcaactaaaatatcgaataaattagcataatggcattctttaagttttgcagacggattaattcccttaaaaccatcagctttaaagccaccatttcgcccaaagttttttatggttgccatggctatatttgagcaatcggtcaattcttcgcctgtatatgaatatccaccaacgaaagaagccacttctgacaatgacgtttcttccaaattaggattggaattatccacgaaccacgacttgaacaacgcttgcgcctgctgctctaaattatcatttatccggcggttcagctcgattttggagtcgagagaggaaagaacggaggctatggctttttgagtatcaatcttaggatagtcgattaggatttctttcagttctgactgcttgataccagttactgttgtaccagtttctctcgctttcagcctattttgtccgatatttgacaaaaagaaatattttagatatgtattatccaaaactccttctttacctcgtaggcagactattctttgtgctaaagctattttctcatccgttaattgtgcgacttcgcctaatggagcttctgtcgtaagaacaacgtctcccacctgcggaaaccctctaaccatccaaccattataatcttctgtcggaagaaattcagtaggagtatctattcttccatttttgactattttagctgtaattaaagggataccacaatcaactttattgggtgtcttaccacgataatcaatcaaggtatctaaaatatctataagtctatcctgtctccactgttccataaaaatatatctaactatgtgttaaaaagatattgttctgtaaacttaatatagatttcaaattgttttgcatcgtcattatttataaacgagattgttcgatactctatatcttctatgttacttagaacataattttgtttgtcttcattatttcttgttccagcaccgtgtggcttaggtaataacgatgtcatcctatatgccaaatgtttactggttccaaataaaacatatctattagttttcttgttcctaagctgatacactccgcttcccaatggggcatttatgtattctccttttctcgggtctggaaaagatttccaatcactccatccagtattatatgtttctttccattgttccataaatgagaatttagctgtttgtttgaccatctaatttagcctctatttccttaatagacggcattgtaccttcaactttctctggatagagcttttcaagctcaaattcggatattcccaatgggagattactgccctccaaagcatattgcgcaagaagagaatccttttgtcggcagatgagcaaaccaattgtaggattgtctcttccctcttttttaaggatatggttacaagccacaacataaccgctcaactgcccaaggtcttgaaagtcaaactcaccgatttttacttcaatcaccacataacacgacagtttcagattgtagaaaagcaaatcgatgaacttctctttttgccctatctgaagccgaaactctttgcccacgtatgcgaaacctgtacccagttccaataagaattgggaaatgttgccaagtagcgcatctttgagtagctgctcattatactgaccttttatacctgtaaaggcaaagttgtatggatctttggtcagttcttgtgcgaggtcgctcgtttcatcaggcaatgtacgtgtgaaatttgtcaatgccttaccctcacgctcatacatgcctgaatccaaaaaattgagcatcacatcgcgactccagccttcttgtatggtctttctcacataatatatagcctttgcaggttctttgctgcatttatctattaagtagcggtgatgcccccaaggtattgagaacaaatcagaatataaatcttccacaagttgtggaagatttacattttcagattcttccacaacctgtggaagaattgctatatattgactataaaggacataaaatcgtttcgcatagcggattgatgtctcagaaagtccttcgacatcaggcatttcatggcgcaagtcacggcttagtgtagcgtagaacttgctgccgtatttgttgtctgcttgttgctcttcaatgtctttaccgagttcccaataatagcgaagcaattctttgttcacttttattgcagctttgatttggctaccacgataacgctttacaagttctttgacccataaagtataatctctatccaatatgccgattgatttatccataattatttctctgtttctatttcactattttttaattcgcctgacattagcttcggaagaagtgtgtctcgaagagaagccaaacgtgagacctcaataccatttgcttgtttcgttgaaagaagatcagatacaactgaattaaattttgatacaacttctttcgtaggaataacaaatgattctctctcaatcaaactattgacgttaagattctttagtccatttgaaccattctcataaataaacattacccttaaatcataaaggtattgccacaaaagataaaagaacattgaataatcctcttttatctccaatgacttacaaaagtttgtacatatcaaggcattgccacagtctgcaacaaaagccctatcaactaacacaatacgacctgtcgattgtgtgggcgagcctcctgaaatttccacaacaacatttccatcgcaaagggatttatcgttaaaattcttttctaaaatgtaacggattggcattttacctttattaccttcttttatgtctgggaaatctgcgcctcgcatacaaaatgttttctttgtgtagtttcctgttggctcatctttaccccaatcgccagacttaaccttttcaacaaggtattccaatggttttattttccaagctttcggtatcattccaagctcagaatccacaaattcaccatccttgaacggctcaaaatccacgaaccacgccttgaacaacgcctgtacctgctgctctaaattatcatttccgcgcttgatttttgggaaatatatgcttctgccatatgacgaacaaacccacatactaattgatgaatttgcggtgagagagtttaacattgttttgattcaccatagcatagtgcatggtggtgtcaatcttgacatgaccgagcaaccgttgcacttgttccacaggcatacctttgtcgatagccatagtagccaacgtgcggcggaacttatgaggatgaacacgcacaatctttgctatgcgaccgattttgcgcaaccgggtttccacacccgatatttccaagcgtttatgaggttttgccaatgagacaaaaagagccttgttgcggtctttgcgagaagctaagtattgctgcaagtgaatctttgcacgggcattgaagtaaacgatacgttccttgttacccttaccgaaaacaatacattctcgctcggtgaagttaatgtcttcacggttgagtttcactaattcgcccacacgcataccagtagatgcaagcaaatcaataatggcaaggtcacggatttgagtgcagttgtcacgaagctgctcaatgttttcatcactcaacacttccttgacttgcgttccggtctttaccttgtgaatcctacggacgggacttttcacgatgtagtcttcttcttcaagccaagcgaaaaacgaagaaaatatccggcggatattatcaattgtaactttgctcgatttatttttccgttgaaatacggcaaggtaggctctgatgtcctcggtggtgtaatcggttacctttttaggcatcttcttgaacaactgccggatagtagaaccgtagtatttgattgtaggagtggtgcagccctccacttgctttgcagacaagaagatgtcaagcaaacggtcgttagacgctgcgttttcgtgcagggtctcgccgtcttcggtaatagtgtagccgctcacaatctggagcaatacactattaaggtgagctacttgttcaaaacttaacacttctgccattgcggtgctgatttcttggattaatttttctttcatattcttcgttatttagagtgaatctaacgaagagtagaagttttttacttgatggtaaaacctatacttgccaactgtttgcggatttcatcttcaagagtatgtgattgggcgaacaagtccgaaagctcggaagtgaggcgttccatcttttcttggaatggttcaccatcatcctccacctctgcgatgcctacgtagcgtccgggggtaaggatgaagtcttgttttgctatatcctcaatagaggcaatagcagagaatcctttttctgtttcaagcgctccggcacggaacttctcaaaagtttctgcaatgcgtgcaatatcgttgccgtggtcttcggcttcctcaccacaggaaagttcgcgatgtgtgcggtctttcatatagcccatattgcgagcatcaatgaaaagagtcttgcccggttgtgccttctgtttcgtcaaaaaccaaagacaacaaggtatctgcacgttgtagaacaactgcgaaggcatggcaatgataccttccacgaggtcggcatttactatatttttacgaatatccccctctgtgccttgctgtgaggaaagcgaaccattagcaagaacaagcccgatatgcccgtcatctgccaagtgatagagcatgtgctgcatccatgcgaagttggcgttgccttcgggtggtatgccgtattgccaacgtgggtcatcacggagttggtcgccgccccatttggaaatgttaaacggaggatttgccattacaaagtccgctttgagaaaagggtgtttgtcatcgtggaaagaatcaccgaagctgtcaccgaagttggcttcaatgccgcaaatggcaaggttcatctgtgccaatctccatgtgttgctgttcagttcctgcccgtaaacggatattttgttgatattaccttggtggcgttcaataaacttactactctgcacaaacataccgcccgaaccacaagcagggtcaaagattttacccttgtaaggctggataacttcgactatggtacgaaccacgcaagagggcgtgtagaactcaccacctttcttgccttcttcgcgagcaaattctccaaggaaatattcatatacacgtccgagtacatcacgagcttccgttcctgtgaaatgtaggttgttctcaaaaatatcaatcacattaccaagacggcgtttgtcaagttcagggcgagcatagtttttagggagaatacctttgagttgcttgttctctttctccaacgcttccattgccgcatccacgacaactccaatttcagcagtcagtgaggctttcaccactttatcccaacgggcgtcagcaggaacgaagaaaatgttgtcaccgatatattcatccggatcttcttcaaaaccatcgccctctgccacaagttcatcgtgcttgactttgaagcagtcattgatatattttagaaataccagaccgagtacaacacttttgtactcggctgcatcaagattgccacgcagctcgtttgctgaatcccacagtgtttgctcaatggttttctttgttgcttcctttgctttcgcctttttcgccataatctatattaaaacaaaactcctacgctatccctgcgaggctgaccaaagcctataagacagcgaaggagtttcggatattgttctattatttattcttcaggtcattagcgcagttgcgtttagagtacaaaggtaatgctttttcttggattttcttgcgtaatccaagaaaaagtatataagcacacggaagctaaagtttaaacagattgaacattgactacagatgtgacattttggcagcagcttggctaaattacgctcttggtatggtgtttgccttatgtgaaacagtaatttaaaacgaacaaaaatgaataaaagagtttatattagtgcagattatgatgagggtagcggtgatagaaatgtagttgaggaacttaataaatggggcactgacaattatcacaaagttgattttgttgatatggcaaaggttgtgtctggtagtgtatctgaaaattccgattgtcgaaaatgtgatttgaaatctgaatttaacagccaaattaatgcttcttcagcagttattttcgtcataggtgacaaaacagcaagtcgtactgctggatctggatgcgaaagaatgtacaaggagtggtttcaatgcagttgtgctccatacaagcataattccagcggcttaaaaagctgcaaacatataagcacatccccttcggatccaaatggcgattttggttgtattaattcatgttcatatcttcgccatgaatttgaacaggcgaaaaaacgatgcaaaaagattatagtggtctataattcagtatataagaaagagaattggttgccaggttatatgtacggatataaagatgttgcagtgccgttctggatatatgatagttgtggaaacaagattggaaactatcaatttataaaggaacaactcggatatgaataaagattggcggcaaatttgttcatatacatttgccataactactggctgtttctcttttattccagaaaaatttttctcagatgtttattcttgggcttttctttctgagtattggagcgatgcaattaaccggattctattcttattgttggttggcatcctaacaggaggaatcgtatttgtatggaaacgttgtcgtaaaaaaatcacaattagtggttcgaattacaaaataaatgtagagtatggggatgtttttgaacaaacacaatgcaagaaggtaatcaatttcgatgaatgttacaccacagaaataggtgatgctatccatcaaattaagccaacctcattatgcggacagtttttgcagaagcatacagtagacatatcatctttgttatccaacaattgtttgaaaccagcaaggaaacgctcggaatataatggaaaaatgtgctatgaatctggaactttactaccttatggaaagttcttacttatggcttttggaaagttagataaaaatggtcgtgctgttatgagcagagaagattatttgtcttgtttaaatactttttggaaagaaatagataaatattacgcacaaactgatgtggcaattcctattcttggggcaggattgacacgttttgagggagaaatgctttcgcaacaacaattggtagacataataatttcttcatataaattgaccccatataagataaaatcacccaatgcgcttcgtattatctgtagaaagagtgatgatttttctttggataaaattggagaaaacctataaatttgcatgagaagaaaatgtaaaattcataattacattttctcctcatggcataatttccacaaccgaaagtgtcattttcaattagatgatatatttaatggaatatgagcctgatttcagattctttatcacagaaacaaaatagtgatactaaaatggtactaaattacaaattgactcttacaatgttgtcataaattgtatattatcagattattgcacaattatatatcttgtagcccaccatccgatacgatacacaatcagagcgataagcatgatgattttgtcgatacctacgatgactcctgccgtcagtgaggtaaaccacagttcggctgcgtctttctccatcttcgtcacttcgtccactccggtttgttccatggtcgcttctaccaggttcgggtcggaggtacccgtgtgagcgacatctgcctgtgcttgcaagctttggtacatcgtgtcacgtacatggataagttgctgcacttcctcgaatttgtccgctatttgggtggcttctgcctcgtacaggtcatgcgtgtacgagccgatgcagttcgggatgtaagacaggaagtcaaggaaacaccaactgctcccactgccagccatacccgtgtctgctggcggataccaccaacagaggatgattgaaacagccaaaggacggaacagcttcagcacatccagtggctcatgtttcaccatcatcttgtacgccattcccgctgccatcacaatagcgaacagggcagccagtgccatgcacatttgtagtatccaccagaacggtccctgcgagccggtaaaagtcgcatcagtcaggaactcgttcgtttgaaaaatcacatcgtctatttcttcttcaaggatattaataccgaaatccgagagtatatttccgtctgccatacgtttttgttttttcagttccctttgtttactgtttcatctccgtcgccgctgccacccgtgttattgcctgattgcgggccgcgcacggcaaagcgcgattcgtgccatcggttcaccgcatcgcggacaatactctccttatccagagtacggtcagcggtagcattcagtagcgtacttgttatcgtagtattctgccgtttggcaaggtagccgacaaggatttcgttctgtcgagttatatcctcgtagatgcgcagatactctttcttccgctgtgcgttgggcatataggcatctttcgttgcatcaatggcgcactggtagatatggtaatattccgtccatctgtctttatcctccggtgtccccccgacaggcaagatgcggtctatgtttcgtttgaaccttaccatctgtccgttgaccttatcgccttcagcgacccatgcgatgtccgcttgacggtcagccacgttcaaggcttctatctttgcccggctcaccaatgccgagtcgatggcttcagcttcgtccgtttggttgtataggttgacgcccgccagtgtgcggaacgacagtttgttcttgactgctgccgacttcttatacttgttgtgcagtatggaatagtagaggtcgggcgagagtgctcccgtaccggtttccattactgttacttggttttgtttcggcgaatcgtggttataggtcacggattgtgcctttgccgccgtggttgcaattattgtaaccgtcacgagtaagagtattctgtccatatttactttcggttatttgttattaatctttcaatactcaatgtgtttcaatcagttaatcaccaggattattctacatttctttttatattatattcatttctaatcctttcctctccccgcaagaagtgcatatcatccttttcaatacaaatacattttctattcgtatgaatacaggcgattgcagtgctcatgcttccagaggcaaaatcaaggactgtgtcaccctctttcgtgtatgtttttatcagatatttcaacaatgcgactggtttttgattaacatgaatcgttttgccctctgattccgcagttttaaaatatttcacacttcgtgggtatctcgttcctttgttttcatttctgaatgtaggatttggtaccttgtttactcctgtccagttacttcctctctttgtacgattctcataaggctcaccttcctccatgattggataataaggagttctgccgttacaaaagatactgattagctcatgcgcttttagaggttgctttttagcaagaaggaaattgcttgcttttgacttttcccatacccagtcgtatttaaattcggctaaattgccacagcgtaaaaggctgctgaacggttcgctgccaaataaagccgtaggcgcattatcctttctcactcttctaatctcctcccacattttcgagaatggtattatcttatcccattgcgaggctgtaattccgaaaggtgggtcgcatagaactaaatcaatacttgattctgggagaagaggcattacttcaaggcaatcggctttatatagcgtaatgtctttttcaaaaacgatctttttcattacatcttttattaatccaaatgtccatttgcctcttggttataggccagatagacttgtttgtacttaaagtttctttctctgtttgtacttctccgaacattcaggacgaaacgcttttcctgcgttttaagatattccttatcaatttcggtgtatagaagtcataatcatcattatggcattatttacctccttcctcttttaccgtcaataatccagtcgtcccgcattgcgccatcgtccgaaagcaccgtcaataatttcccgtttggtacgttcccggtaaatcttcgatttccagtagccgatacgtacctgtatgtatctccatgtctcgatgtatgcccggttcaagtgttgctcaatgctgtccagcgacttgttcacggactccagtaccatcagcaggtcgctggtcgagcaggccgctgcgcccgtggcatacagcacgaggtcgctcaccgacttatagaggtgttctccctcgttggcgatgtcccgtattgctttttcattgatagtcagtatcagtgcgtctgacggctcgatgttcccatgtttcaggattttctcatggaaagcctccagcatggtcttatagtcaccgatacggtcacttaccgagctgtaggtatccttcacgttcagcaccgtccgcagggattggtacatcacgtcgatgacatcaaaggcacgggtatagcggtcaaggtcgatatttacttccttgtatttgcccgtctcctcacggctgtactcatgcagcagttggttgctgtattccagcgtgcttcgggccagcaacaggctgcgttgttttttgtggtcatttatgtacgcttccaccgacacgatatcgaatgtccattggcccttggcgacatcgggtagtagcgcaagcaacgtaatggccatcagtatagtgcgtttcatggccgtacctcctttctgccacttcgggatgtccgtgcgttttctacccagcggtcatggcactcttccacgagtgtcagcctacgaccctcgtccgtatcgagttccggtagcacatccttcagtacgtcgatgatgttccgcttgtagtgcatcatcttctccaaggatacgaggtcggcgtatattttcgtgatacgtgaatccacttctcgtgcgatttcgaggcggtcacttgaccaaagcaggtggtacacgtcgctgttcggtacttcttccataggttctgtacgggcatactcggtagtgattttacagttgggatattcccgtgcgatttccgatatgcgattattcacgattttagtcttttcctcgttcgacaggttcggatcgagtgtcagtacatcggcaacgtgcgtgtctgtgtatgccgaagtcaattcccaactgatttggataatggcacggtgaatcttgatacccagaaagtatttcggcttccgtgcgatagaaatagtcgcacggaacgtaatgataccattgatgttcggcatcgtcgccttacggacgaacgtatagccgctccatgtacctccgtcctgccaagtgaggctataggctgtcttgcaatcctgcatgatagccggtaggcggtagtaatcatctgtcggcacatcgttctctgcttccgcttcctgctttgcatctgcgtactccttctgtttttgttgccactcggcaagttcgcttttcagttcctcgatacgtgtccggttggagttatattgttgccggtaagctgctgcgtcttccacgctcgcctcggcaatttttttcaaaaggtcggcgttttccttttccaaggcactaatctgagattgaagaacggcgacttgattgtccgcttcccgtatcagtgcgtccagttctgaaagatccagttcgttctccgttaccgaggtctgcatgacacactctttggagtgggcatccagtgagccgccacacttgcgacacttgtattgtgtcgagccttgccccagcgtcgccccgtctgaacaggttacactgatggtcacgctttcgcatccctgcaattttgcggcgtccgtcgcctgataatagttccgtgcatcggatgctatgtaatagacatagccttcctcgttgtcattgaactccgagaggcgggcattgagctgcgctttgaacgtattcaaatccatcgaataggagtcgaagacatcctcatagaccacctccatccgattccaactctgtgtcacgtgtatctcgtaggcgtatgccttctttgtctgtttgttacccttactgatgatataggcctgttgtcgggtattgatagtataggtgtagccatcgttgctattgttgagctgttgcactcggcttcttgaccatccggcataccgttctgaattggcgagggcctgctcccgttgcgaagcgttcggataaaatcccggatcactcgtgttaaagcgtgtccatgcacccccgttcaatatgctgttgtcgtctgtcggtgggtagtagtcgcatagagaaatgcttccttgatcacgccgtgcgatataccaccgttgcgtgtaatagttcccgacagcattgtccatatagtcggtcatccacgatgtgaggtcgtaattgctgaaattgaacaatgcggccacgctatcctgaccgcccaccatgtcgattagcagactgccgatgtcatgttccgcctgctcgaagagagtaccgtagtgttcatacaggttgccgatttcattgactttgccacccaataggtcatggaacgcactactttgcagtagagcgtcaccgaggttctccatacctgatgttgccagccctacgcccatgttataaaggttgtcaatgtcgccctttaagttctcaatcgtgaaattgcccggcactttggtaaagttgtccaacatccgttgccaatcggtaccgcccagttctgcgaggttcagcaaggtggcaatgtcgcggtcaatttccagaaaagcgatgtccgagaacgacagcgtgctgtttgtcaccacactttcgaactgcatacacaggctcttcgtatcgtcgcacactttcatcaggtagctgccccagtggattgctgtttgtggtgagcgcagcatcagcttcgccaccacccatattttcggcatgattttttctgccaccatgtggtaaattcgacgatagtagtaattttccgtgctgctgcaccagatgccaaggtcggacagagccttgtgttccaaaaatttggaagaaaatatccctgctgccgccacttctgccgccgtatagtgtttcagaatatcatccacctgctcgcggtagtagctttcggctactgcctccgtgccgaatgctgcggccatggccgccacggtacgagcgtcatagttcacgctgtaatattgtgcgtgaacgtgctgtgtcagggcaggcaataggataacccaaaagataaacagccgtttcatcgtttcagacctcttttatgtattccggttccttgtgattgaaataccaccgttcagattcgatacaattctccgtgacaagtcggcagaacatatcatgtatgatggtagtatccttgatggcccttttgatccgggcttcttgggagccgaaccatctcaaaaagaaaggctggtttagataagtttcgcgcacggtctgataacgtagccatcccaagtcacttagtcttttttcactcatcggactactgttcagttccctgaatagttcttctcgaaacctgttttcatcgaagacaggtttgctgttacatagcctgtcgcacatatcgtaaaactccttttctttggggttttcttcataataccggttcaaatacgcttccagttctacatcggacatacccaaccgaagggaatactctgccaacaaccgttcgatggcggctactttgtccggtgtcatgtcatccatgcggagcaggttctccttggacagcatacaaaactcccggagggacaaaacagtgagttccggattgctgacagagatttgttcgcgcgtcaagctgctttcaaaccccatcatatttatcccgtagcccagtgacagggtgattaaaatccttttcgttttcattatgatgttattttagtggttaagttcagtacacatcccgcttcattaactttctgcgcaaacggcaatgccttgccgataccgctggtattccagtcgcggcaatatgcctcgatagcctcttggtggctgcattgtaactcgcgcttgtaaagcttcagagcctctttctccgctcgttcggtcgtgtaagtcatgtagcactcgcgcggttcttccacgccataaacaccgctggtcgtgccccgacggataaacacctcgcggaagaagctgcgtccttccttgttttcaaggcggttaatggtaaaaattttcttacagtccacgtccgttaggccaagaatcgtcttgatggtgtcgaaacgttccttgaatttgctctggtcaagcagcatcaccacatccgagttattgatgatggcctctttcacgatttcgctgccgatgatgtcttgtatttcctgtgtcaccacgcccacactggcccagaatttacgcgctgttttgtacataaatttaatgtactccgccatcagcgggctggcgatggctttccatgcttcctcgatgacaaggactttgcggttcttcttgatgcgcattttttgcaagaaaacatccatgataatcagcgtgaccaaaggaaaaagcagcgggtcatcttttatgctgtcgatttcgaagaccacgaacgtctcgtcgaacagcgagctgtccatgttctcgttcagcgttttttcgtggttgccgcccaaatagaagtccttcatcatatagcggtatgtcgagaggtcgatgcccgtgatacggttctcctcacagatatccgggatgcgctgcacggaatattcatagaaagagttgaatgacagttcctccactttcagttccttgcgtcggccctctatcttgtcaatgataccctcgatgcggaccgcgcgttcccgttcgctttcgtgccgcttctcactgctgttgcggtcatcaataacgaggctcttacgcaagtcctcacgctgttggggtgtgaagccctcgaaaccattgaagtaggcgtcgtaatattccgtgatgacgtgctctatcagacggtcttccgtctttgtgaccgttccctgcgtacctttccagataagcaagacgaggtttttcaagaatcccgttttttctacgttcatctcttcccgattgatgcggaacggattcatcgtgatgggccgttcctcggtatagctgatatacttgccgccgaaatactcgcatagcccctcgtatgagttacccgtatcgaccattaccacgtccgtcccctgttcatgcaactggcgcacgacggagttcatgtggaaactctttccgctgcccgaaggccccaggcagaaaaaattcgagttgtcggtcagcttgttctttccctcttttcccgtgatgtcgatagctaccggaacaccttgacggtcagtataataaatttttatcggcgtttcctcactatgctgcacccgttccttgtacatcaggcataccgcagcgtcggagagggtcagaaaacggtcatattcctcgttcaggctgtaacagttgcccggaaatgaactgacgaacagttccagttggttgtatgcacgcttactgatatgtatgcccatgcgcccaaaagcgttttccaagtgattcgtgcatttttgaaggtcggtgtcggcaggcacgcccaccaccatgttgaagtgcgtgtacacgagcagtttgctttcacgggctattacgtcctgtacctgcttgatgtcctctacggccatttggttactcggattggggatgcttgcgtgccggttcttctttttgtcgagtaatgccagttcacgcttctgactgggcaggaaaataatttggttgtacaccaccgtttctgcgttcggaatattatccaccaccgagacaagatccactggcatctcggtattattcacctcgatattggtatagggacgtatcagcgaggggagtgcggcgcagtccacgtccacgaggctgtacaccttacagcgtttatcacccatagataccgtttcgtcgtcagccttgacattcgtcatcgagaccgtacggtctttgaagttcatcgcaaagtaacggtccacatattcgcttgcctcggctttgttcaggaatttcacttgtacaccgctgtcgcgtagtaggtctcgaaccttataaatcttcacgaggaaatcgcgccatttcttgctatcgtaagagaaaagacggctcttcttggcttcctgtgtgatagtcagatagcaaaggctgtccgtgtacggacgcccattaaaataacggaagtacgatgctgagagaaattcttgattatgctccggctcgttcgcgaactgttttctcacgaagatgtcctgtttgtgtaaggcatatccttcgcccagtgtttgcgcaagggcagagaatagatgcgtgaaatcgtaatagctgtcaatgtccgccgaatacttctgtaccggattttcgattttcaagacggcggaatattcacccgtcttggtgtacagcacacccacaccatctgtatcttccacagagaaatagatattctgaaagatgtgcttgcgcttgccgcccgtaccgaacgtatagactgacaaggccatacccgtacatagggcgatgaaaaataaaatgatatatagggtcattccgatattcgttcattaaataggggcaggtctgcctcggctggaggcggacccgcccgcgttcaacaatcaatcagccacacacattgccgtgatggtttttcttatagtcatactttgtgcgaataggcatacacatacactccacgttttacatttttgctgtgcagcccttttcgctgtttgaggatgataagcacgattcccgcagataagacagttgccaatacgaccagtccggccacaaagcccataagacagtaggcggcgataaagcccacaatggctccaccagccacgcctgccgcccaatagatgtagcggccttgtaatcccatcagctccaaaggccgttgtaaccccttgaacagcggataatccggataacgtccgtcattaatcatttcttgactgtttatgcgttaattccgaagaacagaggtaatgcttgggctgccgcaatcaagaaaaggcacgccccaactaccatcatgatcttcttcttgacatcctgttcctcgttgttcatggcgatatacaccgaaatggctccgatgatggccacgacaccagcaatggcatagcagagtttgaccatgacaggaacgtatttcacaatttcctccgctacggttgatagagctgtcgtaccggccgagtaatcgcctgccgtactttgagccatagcaggtatgcctcccaacagggcaatgattaacattcttactttggtggaaacttgcatgatggttttctttgcctttcggcacattcttttgaatttctgaaacatatttattacatttttgtggtactcttgttttttttgaatttattttacacttctgtcagccacctatatgcggtagccgaagaaagcagggaacacgattgaagcaccaatgatgaagaggcacgcaccgacaagtgatacgatagacttcaccacgccgtcctcgcctgtgttcattttgatatagatctggagcgcggcaacgactacgaaaaccgaggcgacagcgtagcagatgtacagcacgtacagcatcatcgtcaccacgaagtcgtgcatcgttgccagtgcgtctgcaccccaactgtagtttacgctgccacttttggcgaatgccgcataagggacaaagcacagtgcacataatattttttttgctttcgacattttacaatcggtctttgagaggtttccacaccagttccggacggttgcccgtctttcctttggcaagcatcgctttgtacagttcgtctgccgtgtatgcgtctgacaggtaggtcgcggtttcttccatctgttcctccgcttgggctttcaggcgttttagtttctccgccacggctatctcgccattattgtctgcggtttccgtctcctgtggtgcaggcgaagcggtaggggcaacatctgtttcatatttctcattacccacattgaatcccgtatcgctctccgtcacgtacacactctgttcatcttctggcgcaccgaggtcaaatacctcttcttccggcttgccatttcctttttttccataaaggtcctgcacgatgataactgcataatagacgagataggcaaccgtcaggacaatggtgaaaataaaatatgatttcatatatttttgtataatatgatttttatatttggttgtgtgtgcaaaataagaatggataatttgaaagataaaattattgattataaaacgtatcgttttaatataatattttttcaaaatccaaaaatcatatttcaaaatcatattcaaatataattttagataagaaaacaggaaaagtcgggatataaaaaaaagccctccgtgatgaaggagggcttagggagcggttttttcattgtttcttcccacgtaagtagtcgttcaggtctttgtaaccggcataacagtttgattcgttatagacgcatctgccatacatcccggctatggtttccactgtcttttgtccggcaaggtcattgtcaaggtaacagtgaatatacgtgtatttttgcaaatacgttaatgtccttttcagattactgaccgagttcataacaaggtagtcacagggggcattaatgcaaatggcactatcgtccgtctgttttagggttagataggacagaaagtccatgaatccttcaaataggcagacacggctctgtgcctcaccacgcgattggggtatcaaggaaatgtccttgttcttgatacatcctttgtaataagggtttcgtacctcgtatccaccggatatattgccaaaggccagtgcaaagtaacgtttctggcgcagttcgtaatggacttccttgcagaacattcgtccgatatccgaatcaatcatacgtgaatggagatatgagagcagtgcgtggtgtcgcagcggcacgataatcaaattcttcatgtcggcttccactggtcgagaggttgcgggcaacgcccggggtctcggcagcgacacaccattgacataccgtttgatgtatgctaatgcttcactcacacttttagttccgcaaaggtacttacccagttccacaaggtcgcctccggtggcctcgccaaaatcataccattcattcagccggtcattgactttgaacgatggcgtcacctctttcctgagaggcgaaagataccaatattgctctgatttcatatactgcgcacggtggccgagctgggccaaaaagtccacgatacgcactcgttttgcttcgtctatggtcatattaaatttcttttcacttgtttgtacaaaagcggtttagtttagtttgcgcccctatatatataaatactaaattaaactgaattatataggtccgcgcccgctctcattcttcatcgaaaagcatggtttctgcctgtgtcatgtcataataaaaaagtttatctcgtttgataaccagttttaaggtgtcagtcagatattgcagcagtttgaccattacgtttctcccacgcttaaatccgattgcctcgtaagcagtcatcatggcttgcagcatattttcaaacccacggatgggtttgtctccaaacgcagcggaaagggcttcacggtgctgttcgatgcttagttccataaaacccgtccgttgtttcggtttctgatgtggggcattctcaaacaaatgcccttctgcgagaaccgggagcccaccctcattgacagtgaaagcaaaaggtttaaactctttctcacggatgtgtaacgcatgaacttcgctgacgttgggacaatcgttgtttttgctgatgaccagtacagtctccgccttgttgctcatttccgtaccgatatgcccgcgcacattgttatctcctttattcaagtgtagcacacagtggatatgcaggtcatactttgatgaccattccatcatcttgttaatgacttccacggactcaccggtactgtttatgtcaagcatcaggtcacggataccatcgataattacaagtccgtatccttttctttggcgtaaggcgtagtcgatgaccccaatgcgtatggccggagagtattcgcgcaagcaaataaagtcgaggttttcactgtcggttgtagtgggcagtccggcaagccgcaagatgcgttccagtacattgtgacaatggaagcggctctgctccgtgtccacgtacagaatcttgcgtttaccttccgggaggtgcgcccggtagttcagcacttgtttccctgccagcgatgcagcgacaatggccgaaacgttaaatgttttttttgatttcgccttgccggttgatgcgctgaagttgccgagcgtagcaatggtcgagttgtctatccagataatctgtggcggcgtttcataggtatccgtcgcccgaatctgcgaggcggagaggatatccgataagaaatcctcctccagcctcatatccacattatattcagttcttctttcgttttccatggcgtctttgattaaagaaaggttgtgtggcagcggcctcgtttgccatacgtgctgcttcatctacggttggttcataattctgcaaaagccattcgtccagatcttctttggcgaaatatatcattttgccacgtggcttgtagtgcggaatctccttgcctgatgttagcttgtacagcatactctcggatattccgatatacatacaagcctcttggaaggtaaacacctgtttggtggtatatatatttttttccagcaatgcgatgcgttccaacagactttctatcggatctaatttctttaggatggcttcgacgcttgtaagccgttcactcagccgttccatgaatgtcaatctattattttgcataaatgagttattataaatttagacaatgaagtatatcctccgttatgtagcgcgctaacggaggtcaaagatagggcaacccaaaaggtcagcgtgagtttgtaccgtgatagtaaccacgtatcacggcaactgtcacgcttttacctttcacatacttcgcttattggcacttcttaccactctctcagttcatcaatggctcgtctgataccgtaacctgttgatgtcatgttgttacgcaaggcagacagagcggatgaaaggcttgaagctgaaacgaatccttttccatccttggtttgcaagaaccgcccactactgagaacggactgccatttggcttggataaacgagtgctcaaggagtgtatcaaacaggatggccacatggcggatattgtttacacgaatacagaatccttctttacaggaaagcagggcttccatatcttcaacgtgtagggtagaaacgcaaaacagatgataagcattggcacaagctgtaatacctatcatctgtttacgagtgagattgcatccaaaagaaagaggataaattcttgtcggtccatctttgcagcacgtgacggactgtgatggtggcacaaacgtatcatacgttcgtttcagttccatacacttctcgaacgagaagtctgcttcggtaaaaaatgctcggataagatgggagcaatcgtttaatagccccttgacgatatgaatgttcatttcatggcagttccggcagaccgcatggtcacagtcgatataccggtggctgtttacgaaatcctccacgtaacggtagtactgcttattgcccgtcacgacatcacggagatacattgtttttgcttcaacgagcaatgcgaataattctttcgctacatcctgttctgcaacaaaatggtgcagatgttttttccctccaaaaagagagagagccattgttaggtcttttcatgatgaaatattttaaattggatttatatgatatattataagagtgttgctcccgaaagagaatcctgtcggaacaacacccttataagtgattacatatctgatgttcattgcattgtcaatcgaataaaccgttggtcagatttactgcatcgtcttttttcttattgacgattttggcatacacttgggtcatctttacagatgtatgaccgagtaatttagatacagtgtacaaatcggcccccaatgtcagcatcattgtggcgaacgtgtggcgggcggtatgaaaggtgaatcgcttggaaattccggcggctttggcccatggtttgataagctggttgataccagaaggcaaatcgaacacatggtcgtctgctgtcttgtccccacgttccggcatccacttcaacgcttcattggagagcggaaggtaaatcggttctttcgtcttctgcatggctactgccaagcggtattggccgttgtcaataaacacatctttccattgcaatccgataatgtcactgatacgtagtccacagaagcaggagaacaggtaggcactttttaccccttcgttctgcattggtgtagcgattaatgatctcacttcttcaatagtcatatacgaacgcacactttccggcatcttgggcttctccgatttttccatttcgttgaatggattctttaagatccgtttcgcacggacagcggcatttaacgcaccgttgaaaatctggtaataggtattacgcgtagaagccgagatgggttttcctttgggacggtagtttgtcagcatatagtcgatatagccgtggcaaaaagtgaggtcaatctgatttaatgtgaatctttctcctgcatactctttcaagatatcggtaacagattttatctggcctatgtttttcttaccacgtttcttctgttcctctttatagagttgcatccagtccagcagataaaccttatccttgtgattcatgataccggcttcaccacttgtcaactctatgatacgcttcgatttgattgcatttgcggcagccattgtcgtttcgttctgttggcgggcattacgatccgtttccggaataagatacattttcagatactcgtatgtccgcttaccatttcggtatatatccagatacaaactcttgctgccattggccaactccttcgtccgaagacgaatcggctcctttacttttattggctttctggtccttggcatatttgtgtccttttattcgttatttcctatcacaaaggtacaaataaaaaacgaaatcaagaaacaaacaagaaacaaaaatgcacctaaaaagagcaaagcaacagaaaacgtagaaaacaactgaaaataaaaactcgtatataaattattgatatatagatgatttatctatatttatttggaacttgttttcattttatatatgtctttatgattattggtaataaacaaatcatatacttccttggaatagttacgttcacagtatatgccagaagtttatccggatgtgtttcatcatttcctttataagagagaaaatggtcttcgagccaaataacttccttatgttctccgatacaacgaacccgtatctgtgaagtctttgattccgaggtaagcattgctgcaaaagacttttggcaagcatccatatcatcaggatgagcaaaccgatagaagtcattaatatccttaaaaaccattccggcttcttttaatccaagtgtacgaaaataatcatccgtaaaactgcattttcccgtagggatatcatattcccacaaaattatttgatgcgcagcaagtaaagaaagtatcttttgcaaattttctcttacgatctcaccattttcatttagtgaatataaatttgtactggctccatagtcatggttatttgttttgcatattttgttgtgtacactgctgaacgctgacaaatatgaacaaataaagtacaacttgtccctaatcttctgttttttacatagaaacccttatctttgcccattcaaaaagaaaatataatgaaccaagatactatttgtgccatcgctactgcccagggaggagctatcggaaacatccgtgtttccggtccggaagccatttctatcactagccgtatcttcaaacctgcaaaagccggcaaactatttaatgatcaaaagccatacacgctgactttcggacgtatctatgacggagaagaaatcattgatgaagtactcgttagtcttttccgtgctcctcattcttacacgggagaaaatagtacggaaattacgtgtcatggttcttcttatatcctccagcaagtaatgcaactactcatcaagaacggctgccgtatggctcaaccgggagaatacacacaacgtgctttcctcaatgggaaaatggatttaagtcaggcagaagctgttgccgacctgattgcttcttcatctgccgcgacccaccgtttggcaatgagtcaaatgcgaggaggttttagcaaagaactgacagacttgcgtaacaagttgctgaacttcacgtccatgattgaactggaactggatttcagtgaggaagatgtggaatttgccgaccgttcggcattacggaagttggccgatgaaattgagcaagttatttcccgactagtccattcgtttagtgtaggcaatgctatcaaaaatggtgttcctgttgccattatcggtgagacaaatgctggaaaatcgaccctgttgaatgtactattgaatgaggagagggcaattgtcagtgatattcacggaacaacgcgcgatgtcatcgaagatacgattaatataggaggcgtcacctttcgattcatcgatactgccggaatccgtgaaacaaatgatacaattgaaagtttgggcattgaacgtactttccagaaactggatcaggcagagattgttctttggatgatagattctgtgaatgctgcttctcaaatagaacagttatctgaaaaaattattcctcgttgcgaaggaaaacatctgattgcagtattcaacaaaactgatttgattgaagaaaagcaaaaggaggatttactaactttactaaaagactcctcaaaagaatatacagagtccattttcatatcagccaaacaacgggggaacacggaagaacttcaaaaaatgctcattaatgcagctcacttacccacagtaacgcaaaacgacattattgtaacaaacgtaagacattatgaggcattaagcaaagcacttgaagcaatccatagagtacaagacggacttgattctcaaatctccggagacttcctttcgcaagatatacgggagtgcattttcttcatttcagacatagccggtgaggtcacaaatgacatggtacttcaaaatatctttcagcatttttgcatcggcaagtgatggcttgtaaacagccataactaactataaccatttagaataaagtcgctgtatttcagcgacttttatattttaacactttccagtccgtatttggagataacggtttttatctatatttttctatcatatttctaccgcgacagaaattcacggttagcccgaatgtcacagtgacgcattagttgacgtgtgttgacagtggtttacatgtattgacaaaaatcgggagaaataaggcgaaattatccccaatgtaaaggaggaaaatatggaagtaagaaagatttgccaatggtgtggaaaaccattcatagctcaaaaaacaacgacctgttattgtagccaccagtgttccaatcttggctacaaggagcgcatccgggaacgtaagcgacagttgaaacggtcgcaagaattattgcaacctcgacaagccgccgagggacaggatttcttctcttttgcccaagcagcaaaactgatgggcgtaactcggcaatacatatataaattggtaaaggaatcgaaacttcgggcttcacgcatcagcggcaagaagtcgctcatccgccgtgcggacatcgaactgatgatgaaaaccaaaccttatgaacgtataatgcccaaagaagatttcggcatcaccgagtattataccgctgaagaaattgcagagaaatataaggtcaacgccaaatgggtgtggacttatacacggcagcacaaagttccgaaggtacgaattcgccagttcaactattacagcaagaaacatatcgatgccgcctttgccaaatacgaagtggattccgacctgaccgaatggtacacgcccgaagaaattcaggaaaagtacggcatgacacgtgtcgccatccgttcgcaggtgtatcggaacaacattccatccaagaaggagcatgggcagatattctactcaaagctccacttcgacctctcgaagagttccgagcaggagagcaaggcggaatactacaccgtcaaggaggcgatggagaaattcaagctctctcgtgattcggtttacggtattctgcaattccatcagatcaaccgtgagaagaacggacggttcgtcagattcctgaaagtggagtttgaccgggtaatgggtgtccgcaaatagtctaatttatgactatccgtaaattattcaaaaattaatccctgctgtaggtaatctgcatgattacattatagagtttcgccgacgaattaataataaccataaaaatataacattatgcatgaatgcaagaccgtgacattaaggacacgtccgctaaaaggcaggatgatgtctttctatctggattattatccggggtatcgagacaaagagacaatgaaagttatccgtcatgaatcgcttggtatttatatctatgccaatccgagaaacaaacgtgaacagaatttcaacgaggtaatgaccgagaaagccgaagccatccgttgccgcaggttcgagtcggtagtcaatgaacggtatgacttctttgacaagtacaaactcaaggcagactttctggagtattatcgcaagcagctccgtaagcatgaccagaaatgggagtttgtctatctgcatttcagtaacttcgtacatgataaatgcacttttgaagagattgacatcgacctctgtaacaagtttcgggaatatctgctgagtgccaagaagctaaggcgtaacggacgtatcacacggaactccgcatcaggatactggtctactttcagaggtttcctgaaaatactctatcgtaatgggatgataaagaccaatgtcaatgatttcttggaaaagatagagacagaagatgtaatgaaagaggccctgtcagttgaggaattgtacaaattgactgagacaccttgcaagaaacctattctgaaaacggcatcgctgttttcctgtatgaccagcttgcgcatcagtgacattctctcgctatgttgggaagacatcgtggactattctgccggtgggaaatgcgtacacatcattacgcaaaagaacaaggcggaagacatcattcccatcagtgaagaagctttgggattgattggctataattctgaaaagaagggtttggtattcaaggggcttatgcgcagttggacgcaaataccgatgaaagaatggattcgttctgccggaattaccaagaacataacatttcactcgtatcgtagaacatttgcgacgctacaagcagctgcagggacggacatccgcaccatacagagcatcatggcgcacaagagtatcaccaccactcaaaggtatatcaaagtcgtggatgtcaacaaacgtgaagccagcaagaaaatcaccctgacacggcaagactgacagctgctttgtcctcgatttctgcggtcagagtatgattttaggtgaaaaatcatactctgaccgtgatatttagcatgatacgtggtaactatcagtctctttattgcaactatctggaatatcgattatatctttagcgcgaaacgattccaaatacttgcagactatgacgaataaaaaacaaattcagactaaaaagataagttttatcctcgcactgtccgttatcatttatgcggccatagatacttatctttgcctttgccatgacatcaatatcatgcgtataacgactccagtcatccttggactggtaatagctatcatattgtgcggactcctgcacaaatttttctataactggctgacaaaaaatcctatcaacttctctttgggcgaaccatatacccctattgtaaaatcagagaacgccatagaatctacggatgctactgaaacactgcccatcgagcaaccgatggatttgcctgaacaggagtgtcctccatctcaacagtcgaatcaagatactgtaaactctgattgtccgcaagattctcatttgaataaatatgattccatattggtggaactcaaaaagaaagagactgaaaggcaagcggaaatcatggatgcgattcgggaatatgtaaccgtcaagactgccccctatctctccaaagaggatattgccaccctcatttccaatatagagtatatggcttacgatcaacctgagtcatataaaccgattcgttccaatatagacaatccgctgaggtcgcctggacttcgccatttggcatggaatgtcggtgaacgcttgggagtacccttggcgaaaagagccgtttttatcaaagaatcatttccatacgaactcgtaaacgcgacccttgaatatcttaaacttaatttacgggataatgttccaagccagattcccattgatgtaccagataaaggcgactatcgcttccatttagatgtagataatgatgactcgcaataaaaaaagtatgcagacgaaataattaatccggtctgtattgttctgcaaggtttcattgagttggttcgcagcatgttaaacgattaaaatagttataatatggaaaaagaccaactgacattcaacgacctgccgaatgtggtaggcgaactatgcgacagaatcgcaagtatggaaaacctgcttacggagaaactttccaagcagtacgaaaccaaagagaacacgcacgtccccatgaccgtacaggaggcttgcaactatcttaaaatgccgttgtcgaccttttattacaaggtcaagaaagacgatattccggttataaaacagggaaagcatctctacatctatcgtgacgaactggatagatggctggaatcttcccggaagaatccggctccgcaaagtttcgaggacgagaatgagtctttgctcgcctcccatcgccgtaaaccgaaccctaaaaactggtagcgatggaaaagacagacactattattctttctcctgaagaattggccgcttatatggcggagtcaacaataagcgtaacaagtacatacgaacactccccggtggttctgatggtggacgatactgttatcggaacattgggaaacttcagtgcttccatcggaaaagccaaaagcaagaaaactttcaacgtttcagccattgtcgcatcggcgttgaataacagcaccgtacttcattaccggtctacatttcccgaaaataagcggaagattctatacatagacacagagcaggggcggtatcattgccagcaggtattgaagcgcatcttacgtttggccgacttgccggaatacaagaatccggataatctgattatgctggctctgcgcaagttttcccctaaactacgtctggcgatagtcgaacaggccattggcacaataccggatttgggattggtcatcatagatggcattcgtgatttcctttacgacatcaattcctccagtgaatccaccgacatcatctccaaattcatgcagtggacggatgacaggcaaatccatatccataccgtcttgcatcagaacaagaatgatgagcatgcccgtggtcacatcggcacggaactcaataacaaagcggaaaccatcatgcaggtcgaagtggacaaagaggacaagactgtaagcgtggtcgaagccgtccatatccgtgaccgcgagtttgaacctttcgctttccgcataaacgaggaagccatgcccgaaccggtagagtcctatctgcccaaagagaagaagaccggacgaccaaccaaaggaccgttcgatccggacaaggagattccaaagaatgtacatcgtccagcattggatgccgtttttgccaatggaaacatcagcaattacgatgattatatagaacgcttgaaagagggttacggattacagggtataaaactcggttataacaaggcggtaaaggtcgcaacattgctaagcgacaaacaaatggttataaaagaagggaaagattatgccttcaatccagaataccattattgagttcaactttactttattgtcggggcgtatatataagaataaagcaaagtcggcaggaagacatcatgtgagatattcatattctcccctcttttagaggctcatatcatcctatgtttcctgtctgagtgccagttcactatacgcatcctatatggcgtgtcgggaaacatcaacaggcaactgttgcgagatatgccaaggtataacctcaccgcgttacggttgtacattggcgctctcgcctgctcagttccctcgccggtgcggtactcgcaagctcgcacctattcaaccattataaaacgattcaaatgaaagaagatattgaaaatacatcggactcctcgaaagaaaccagaagtgtctttatcggagctaaagtcactcttactcagaaggagcatataaaatcactggccggacaatgcggtatgactgtaagtgactacatattatcacgtgcgtataacttcaagcccaaagcaaggctcacgaaagaagaagcggtactgttgcagaatctggacgattgtcggtcagacctcgtaaaatacacctccgccctacacggaatgtctacaaagcagcgcatggcaatgttcaatcagattccgtttatggtgggctggctgaaagaattaggcaatgtagccgaaagtgtctgccagttcctgagtgcagtaaaagagaagaataaaattccgtctaacccaaaatccgaagaagaatgattgcaaaagccaaagccatatcgcacggtataaacgacatccgttacattaccggcgaatcacagcataaaaagcatccggagaaaatctatcgggtattggacaatctgttgccctcagaaccggacgctatgggaatatggaactccacgcagttgaccctatcccaatatcggcctataaagaattccataatcagaatagagttgagtccatcgcctgagcatacccaattctatgacatcgaagattggcaaaatctttggcaggaattcgccgaggagttcgacaaactggtgattaccggcaaggatggaaaagtccgttcccgtccgaccaatttggcgggtagcaaatactcggtttggcttcatacggaatctaaaggcgaagttccccaccttcatgccgcggtttgccgtttggatgaagacggcaatatcaacaacgaccacaacattcatcttcgtgcgcaacgtgctgccgagcgagtggcaaaaaaacgaggctggacgactgcggcacaagtccgaaatcgcaacatgccacaagtgaaccgagactgcatgaatgtattgaaagcaatgccatcgtggtcatgggatgagtacaagaatgctcttatacggaaaggttataccgtccatgaaagagaggacaagaaaggtattcttcgtggatatgccctcatgaatggaaacaccaaatacaaggcttcagaattgggaatcggcaggaacctgatggtctcgaaacttcctgcgacatggaagaaactgcaccatcagccagctaccgtcattagaaataatactccccaaaccgttcaacaagcagcgatacataaggttgctcctattgactatacccaatatctcacagattgtcaggatatgatttcctataccctcagtcatgaaggaaaggattacaaattctatatcccggaaaaagtacttgactgtttcaatgacgagtttgattacaggtttattgccaactgtcaagaacttaccgatatggctgtagctatatttgtcggactgcttgatacgccaaatgtagcgactggaggtagtggcggaggttcgcaaagcgatcttccgtggagagacaaggacgaagacgatttacaatgggctcgcagatgcgctcgtgctgccagccgcttaataggaaaaaagccgaaaacaagattaaaacgctaagcccatgaaaaagaaatttgatttttccgcagaaatgagtgaagtggaatccataaaaaccactcccaagaatgaatatctggaagaagaaaagcgactactcgatgtaaatgccaaggaacttgccagcctgaataacaatgtatataagctgagaacagaagttgaaaatctgtccggttctatacgtgagtgcaaacctattatttctgaagaaatgcataagttggcagttgaatttggagcaacacttctctgcaattttcttagtcagattgagagcaaatgcaaggaagccgagcgaagaatgaagaaagccgacaataccatccccatcccagatacggcattctacattttgattatcattgtagttgctctatcttcttttttcgtgtgcattattatagctaatgctgaaactttacattccggggtaatatggaaagctgttttagtgtgtagcacaatggctgtagcaggaattgcaataacgatttttcttcccaagatattggaataggcgtagatattacccaatgcgtaaaaatacgcagttcactgcgcaaaatgtaacccgatcaattaatcattggggttcaagaagttgctcattgtttgtttgcgttttttaatcctttacaaacgaatcccgaacctctttcattagtgatatcgggggattcgtttcatcattcatccaaatctattgggagaagattgctattatcaaatcggtcaaaatcagattgaaaagacggtcttgaatgatcctgtacttttcaaactcagattcagtaaactctttggcatattcagcagaaacctttccactatcctgcaatatcgggctatcaaatagattaatgaatttgtctattcgatttgcccaatcttccattgtcattggtatatgacgcatagccatactctctgccatatcaagcgaagcattgactattctgcccatttcttccaattctttttctcgtaaatagtttttttgcaacagacacatcggttttgacaatttttccattcggagcattttcccaagtggtcaatccaatgtgctctttatctgcgttagctcgttcaacaatcaactccgcagcggtatgcccatgtacggcatagtgcattttgttctgtaccttcttgaaaaaaagacgagttgtcggagcgtccttattatagtctatagccgtagcatatatatgtcaatttctgatagaacctacgttcactcaatcatatttctcgaatctcggcaagcaaatgctcaaaataatcctcaccgataaacgaaccgttctccattcgcttcttgtctatcacataaccacggatgacaaactgacgaagcacacatgtacaccactaccggaactgggttgcccgaacagaattgacacgataaccgacactgataatcgcatcaagattatagaaagtcgtatcataattcttaccatccgaagcagttgtttccattttggaaataactgaatcttcgcccaactccccactctcaaaaatatttttaaggtgtttgctaattgcaggtactcccacatcaaaaagctgtgccattgccttttgtgttgcccaaatggtttcattcttatacatcacttgaatcccaccctctttgccttcaagcataaagataagaaactctgttgtactatttcgtatttctatgttctttgccataatttaattttttattcgcacaatcataaatccattttcaattattcacaacaacacttttatgctactatatactacaacacttttttaatatcatcgatgattatcggagataattctaattcatcaaggtctaatgaccttaaccattctaaacattcgtcttttgatttctttgtagatacaatgtatttagtcaattcaagtacagtattgcgacttaaacctaaagccaacaatgatagatgggtcttttgagatactccaaactccaaccaaagatttaactgaggaatactttccatcagttcctgcttattatttatttcgagaacatatcgaagtatatcaatataacaacttgaatcttttgcaaattgatatctgacaaaactttccacattttccattacctctctaatcaccgcaggaagtttcttattataatgatttcttttgtaagattcatagcttttgcgaataagatatgacaatggttttcctgacatccaattaatcaacaaaattgctctagaagcatttaattgaggtggataatacgaaatagtacgtcctataatatcaataagatttttatattcttcaaaggcgttagtatcattgggatagactggaattaatgtgtcaatctcatcaatatgctccgtaaagaaattatataacttctgttgagcaagaggcgatatacctggatttttctttatgatagaacttggtaatgtgatctttgattgaatagaatataattcagtcattaattcgttataaaatggatttaaaggtgccgtctcttcttccaaaacatatcttatataaaaataaccaaaagcaaactctaagtcaggtcgtttttccgcatcttgtctaggtgactcatgacgaatatagttcaataattcttcacctttattttcgataacatttaaggctcgttttatctcttgtttcgttttatttggttctggctggacactccattttgaaggttcgatacagaagatatttccgctatactcttttcccaatcgaccagctctacctgctaaattccaaaaatcattttgattcagcggattcccttgacctcttgttggttttcttattataattgattttgctggaagattgacaccttccagcaaagttgaagtacacaccagatattctattttccctatggaaaacaatcgctcgatttcatttcttatgagcaagggcatatttccataatgaaatgcaattcctttagataaaactctagctaaaacatactgagtatgaatagtgctctgcactaattcaactagggctgttatttctgtgtccggttctcgttctggtagtaaatcataaagcaaagtagcagtatcttcagcatccgcagccccattactataaataaggcatccacctttattcgatgtttgataagcagtatgaactattttatgtcgttcagttgtaggtcgatcagtcataattattctccccaacaaaatagttttctcaatagtacataaatggatttgccattctctgatttttctatggacttgagaaacgtataaaagattttgattaacagcaacaaattgtgtattgaccatacactttctgctattattcataacattatccaaaagaatttctggatttgatgtaaaagggctagaaaaaaataccttgattgaagaattagctttaacaacatcttctatcttttgttgaagtaagattcctctgttcccatcttcaattttatgtgcttcatcaacaataagaatatctattttgttattagcccccccatataaaaaccaatgaagacgctcttgagtaaaaacaaaaatattagatttatcttctataatatcttcttgaggaggcactgtcgttacatttgcctgattatcaatattatattgtttcaataatacttttaaatcagattcaacctgactgattaatgctcttgtgggtacaacatatacaatatttttattaccttcgattaattcttccaacaaaagggtacaaagaatataagacttaccagcagaagttggagctgatatacttattgtctcattatgttgatatgcggaataaacttctctttgaaacttattcaaaagaaatacttcatcatttacaattatggaatgctcaatatctgacttgttttgttggagttttaaagcaaaaggatagctatctctaaagtctttttttatatactgtttcactactgtcccgtaaaagtggataattagttctttgaaattattgaaatatagtcaattacgcggttttttaaaatgaaacggacttgattttgcaactttgcagtctaatacaaatggctgctatgttccaagacaaatacgtattctctcaattaaccgcttttctgaacaggactcagttcaacaactatgttcgcaagtatgatggcaacagatatgtgaaacatttcacttgctggaatcagatgctcgcgatgatgtttggacaactgagtaaccgtgaaagcctgcgagacttaatcgttgctttcgaggcgcatagggccaagcaatatcatcttggtttaggtcgtgaaccgatagccaaaacaactcttgcgacagccaaccagaaccgtgattacagaatcttcgaagactttgcattctatatgatgaaggaagcctgcgagaagcggacgaccaacatccttgacatttccggaaagaaatatgcgtttgattcaacaacgattccgttgtgtcttgcaacattcccatgggcaaagttccgaagcaagaaaggaggggtgaaagctcatgtcttatacgacattgaagcacaagttcctgctttctataccgtaaccactgcttcaaagcatgattccacagcaatgtcttcaatccattatgaaccaaatgcttattatatattcgacagggcttatgactcctttaaagaactctataggatacatcttacagactctttctttgttgtcagagccaagacaaacttaaagtataagacagtcaaatggaagcgaagaatgccaaagaacataatgacagatgcggaagtgaaactgaccggatatctctccgagaaaaaatatcctgagtcattcagactcgtccgatattacgacgaagaggatgaccgtgagttcactttcttgacgaatgcaaaacaactttctgcactggatgtcgccaatctttataagaaaagatggttaatcgagctgttcttcaaatggctcaagcagcatctcaagataaagaaattctggggcacaacagagaacgctgttcgcatacaaatcagtgtggctattatcacgtactgtcttgtggctattgtccaacatgatatgaagttgaaacgttcaacctatgaagttttgcaaattctcagcatatcattgactgacaaaacccacttgcgtgacctgttcgacaagactaatttcaatgatgtcaaagatctaaatgatcccctgattccggggctttttgattaattgtttaactcgtcccattttaacgggacactaatgatactgtttatccaatgcgattttaatcgctggcttaattgttagattatccaaaataaatgcagctgcatttttttgattttcatcagttgtttcctgcattaaacaagtctgagctatgcggagagcagcgtccaaatatttactttcatcataataactaaacaaagatgctatacttaatatattattccaatctattcgagataataaatctgatttatctttatcccagattaaattaggaatagtatcacaaacagacaatgtaagtaaagcctcatattgatgcttgaaactatttaagttataaactttttcagctaacattatttgattgttttaagataacactttctaaattcgtcaacagaagggaagggcattaaaaagacatgaatttcctttttatcaagattctcatgatcttttatcttttcgcctatggtactatgccatttctcatattctgttagtattgcatttttaatgtgttctgtagtttttgtaatatctgtatcacttggatatttatcataatcaaatcctataaaacatacacccttataaactaaatgattggattgttctttatctttatcaaaatactctacgagtatatcttcaacagtttcatcgttaatattttggtgtatattagatgtgatcaaatcaatgtctctttcttgtgtagaagcacaacctttcggatctagcaaaaaacctttcaaactatcaaaacagttcgttaatgccgcattcaaattttgatacattttagcttctgcccaatataattcgaggttacctgttgtacgattataccgaaaatggacaccatctgctccttgataatgcattttcgcagatgtttttaaagacattttacttattaactgtggcagtttcaaaatatcttgtgtaagaatatataataaaatttcaccaccttctcctgttttatccaaatctgtaaaaagattttcagctttctttcttaactgaattatctttcttgtagaacctgtgttatttaaatcattttttgcttcatctatttctttctttggaatagcataatcaactattcgaaaatcaatatattctattaaatcttgaagtcttaagcgcccattcgcatcaacttttagacaatagcaatatcctttagaattagtttcaggtatatctatacagtacctaacctcttcaatacgggattttattgcctcattttcattaattatgagattgtttattgcagtttctattctatccatattactcatattcaaattcttaatatctaaaagttgttctagcgactaatgattaataatacatttcaatatactgataagctttatcaaaaacttcctggtctttgatttgataattaacccataggatagaacgtaatttctttttaatctctcgttgagctgtaatactcttgaatgcgtctttaaatttgcgcacaatagccactacattttcatctatatctgcaacgacacgctctacaattataggagtgtcttctgtctttatggattcaaataactccgtaagagcagcttttgcttgttccctcttatcgagaggttgatttgaatttttttcttcctcaagaacctctttggcaagagttagcaatccacggaggaaatcaatactagttataagattctcctccatatgacgacgcagttcatccaacttttcggcaaatgctttgtagttgggatctccatgatgctcacctaatctcaaacggagcatcttttcgacctcaagtatctttttaggattatctttcgcttgctccaacaccatatcaataacatctccatctaccacaagatcttcaagaggagtacctatatcgattgtatcaatattacgatgaattatctctatagttttagcacccaataaagtccatataagtgaacctccagtactaacaggacgtacactttgatatacctgagccagccaagtataatccgcctgataagcagccagcattgcatccgggcttactgtttcccaagctttagccaatcgtgaaaaatgttttgcaaaattcgtttttgtagactcatcaagtaaacattgctgggcagcttgcaaaccttcccaaccaccgattgtccggtctacaccagggaaaaagtcaatacactcttgcaaaaattgaggtatcaacacttttatctcatcaatattctttacaaccgtttttaccgtctcctcatcaaaagcaaggcttttggctacattatcaaatacaccaacgaaatctacaatcagaccacatttcttatcaacattgtactttctatttgtacgacaaatagcctgcaacagcgtatggtctttcatcggcttatcaagatacatacattgcaaaattggagcatcaaaacctgtcaacagctttgaagtgacaatcaccattttaatcggtgacaatggatcacggaattggtcaagaagttttctttcttgttctctatcacgacggtatgccttatactcatcagctttatcgccagccgtatgcataacgatagtggttgcatcttccgaacccaaaagagcatcaatcgctttcttatatttcacacagcagtctcggttatataccacgacttgagctttcattccagtgggctctacatactctttgaagtgatttacaatataacgtgcgacatcgttaattcgcttctctgctgtaaaaaatgcttcaacagaagttcgttttactaattcgttcttttcgtcctcggatatttgatcggtcagttcatcaaattcttcttgtaattgagtttcgttaagatgcatctctaccggcactgtttggaaattcaattcaagcgtagctccatcttcaacagaattttggaaagtatattttgaaatatatccacctttctctaaatcctcatcagctccaaaagattgaaaagtattcttatctcgtttattgataggcgttccggtaaggccaaagaaaaatgcattaggtaatgcattgcgcattttttgtcctaaatccttttcctgagttcggtgtgcttcatctaccaataaaatgatattatctctttcattcagtacactatcaacatctccgaacttgaaaattgtcgttatcagaatcttgcgctgatcctgcttgaaaaatgcaactaactcatcttttgtctttgcagattctatattaggaatatcagcacgagtaaaatcgcccgttatctgatcttccaaatcaatacggtcatcaacgataacaactgtgggagcatgtaattcgttctgcaaacgtaatttttgggcagcaaataccatcaaccatgattttcccgaaccttggaaatgccaaataagacctttcttcggaccttgtttctctcgatatgtatttaagacacgctgaacaatagcttcaccacctagatattgttgataacggcaaactatttttatttttttgcctgatgatgttcctgtaaaaacactatagtaacgatatatgtcaagcagtcggtttggttgaaccaaccccattacgttacttttaaccgactctattgtaccatgctgacgactttcatctttaaaccaaggtccccatttgtcaacaggggcacagatgccggcatattgaagttctttaccttctgtagcaaaggttaatatattcggaacaaacatttctggaatgctcttttcgtaatgcagcatatcaatggctccgtcagcccatgttatctgagggcgaacaggagattttgcttcaccaacacaaaccggaattccatttatcagataaaccaaatccaaacgtttacctccttcaacagaactacgtggaaactcccattgattggtcactacacaataatcttcgaccgcatcttcgctaaagaatctgataggtatatattcaccatcctttccaaaaggctctgtgttttcattaaataataatgtacgaaaacggtcattggcagtcaccaattcatcataattacctccacaagtaatagcagcacggagtttataaataacttgctccgcttgttgacgtgttattggatttaacctgacaagagcttccaatagccatgattcaacaaggacagaatcagaactacgaggtatatcctgtgactttacatactgccaactactttgggttgcagcttctatgagcatttgctccactgtattgtcttcgttaaacatatctatggtttttattgttatcaacattagtgtcccgttaaaatgggacgagttaaacaattaatcaaaaagccccggaatcaggggatcatttagatctttgacatcattgaaattagtcttgtcgaacaggtcacgcaagtgggttttgtcagtcaatgatatgctgagaatttgcaaaacttcataggttgaacgtttcaacttcatatcatgttggacaatagccacaagacagtacgtgataatagccacactgatttgtatgcgaacagcgttctctgttgtgccccagaatttctttatcttgagatgctgcttgagccatttgaagaacagctcgattaaccatcttttcttataaagattggcgacatccagtgcagaaagttgttttgcattcgtcaagaaagtgaactcacggtcatcctcttcgtcgtaatatcggacgagtctgaatgactcaggatattttttctcggagagatatccggtcagtttcacttccgcatctgtcattatgttctttggcattcttcgcttccatttgactgtcttatactttaagtttgtcttggctctgacaacaaagaaagagtctgtaagatgtatcctatagagttctttaaaggagtcataagccctgtcgaatatataataagcatttggttcataatggattgaagacattgctgtggaatcatgctttgaagcagtggttacggtatagaaagcaggaacttgtgcttcaatgtcgtataagacatgagctttcacccctcctttcttgcttcggaactttgcccatgggaatgttgcaagacacaacggaatcgttgttgaatcaaacgcatatttctttccggaaatgtcaaggatgttggtcgtccgcttctcgcaggcttccttcatcatatagaatgcaaagtcttcgaagattctgtaatcacggttctggttggctgtcgcaagagttgttttggctatcggttcacgacctaaaccaagatgatattgcttggccctatgcgcctcgaaagcaacgattaagtctcgcaggctttcacggttactcagttgtccaaacatcatcgcgagcatctgattccagcaagtgaaatgtttcacatatctgttgccatcatacttgcgaacatagttgttgaactgagtcctgttcagaaaagcggttaattgagagaatacgtatttgtcttggaacatagcagccatttgtattagactgcaaagttgcaaaatcaagtccgtttcattttaaaaaaccgcgtaattgactatatttcaataatttcaaagaactaattatccacttttacgggacagtagtgtgttatcaatttaataattaagcgattttccctaattcgtcactctgtatgtcattcaaatatactaaagctttttgaatgacagattttgatttgtcggcttgtttgaggacctcaacaaacaagatttgttcatccatactaggaacaggaactttcattttcttgatatctgagaatacgatatcaacttgatttgtagaaccagttacatattgcctgtatatttctgcttgcgtatcatttaaagaaaggtacgtattaagcacttctggaagaatcactgctctatctgttgacaaggcaatcacatgtccgtcatttatgtaggtattattgtctgaaggacaaataaatacacaacatcgtccaagagtaccatttccagttgcattcaagagaacatctcctgattcaagtattctcttcctaactgggatttcctcgttgtggtattttatattacccaaacgttgaccatcccaatggatacatgcttgattaatcactaagacagaagaagattcaacatattttagcgttatccccttactcatgattggacaaaccgattcaagggtttgcttattatgagtattataatacatctcgataaattgcgatttgaagtcgccaaattttgatttatctacctgttctgctatgaaaacgaattcaagttgtttgtccattggcggtaagatacaatcaaagtttcttaactcagtgagcggcattcgtggcattttagtacctccagctatatcatttgcataattaacgaactgattaccccgcaacagatgactcaaaaatactttatgcaatttactaggctctggacgtaatggaaccagttctgtcgttgccattccaggctcatctggtatcacaaccttgtttaaataaggccttaattttgagaatagtacattcccttcatcaaaggattgaacagataaagcattctcaacatcttcatagaccttctctattatcctaccagtatttgattctatcatatcaagattcaatagccagattttgccagatagttgctctttagaaggcatttccggggcgacatctttaatcttagcagtcttccaaccttttgtattcgtaacaggattaccaaacatctcgataaattttctgcccgcctgttccagacatattttttgcagcacgctcacgaaatataggcattcgtgttaatgctaacagccaatagggactagatattccgttaattggccgcaatacatgaaattctgtagatcccattcctataccatttgtaagtccatgtacaatagctcctttgccattctccatacaaggtgtaattttggcaaacaagacatcattattctcaaaatatgtaaagcttttttttacttttccatattcttcgtcagtcatatctaccaaatatccatcctcacttaccgccggcataggaataaaagagactttatcggtgtcgcaaagagcaatgttaggacgtcttggatttagaatacaacattctcctaatcttttcaactcattcttctgatttaaagaaagaggattcccaaacatctcgataaattgcgacatactaaccaataaatttacggtgagacatttttacatttgtctgattcaccatagcatattgcaatgttgtatcaagactttgatgccctaagagatgctggacctgctctataggcatacctttatctatcgccattgtcgccaacgtacggcgaaatttatgaggatgcaccttaggaatattcaattcacgtcccaaacgacgtaaacgaatttccacaccacttatctgtagtcgatcataaggtgctaataatgaaacaaacagggcaggattgtcatctatccgttctgccaaataacgttgtaaatgtatctttgtacgagcatcgaaataaactcgacgttgcttatctcctttaccggtaacgatgcattcccggttttcaaagtctatatcgttccgattgagtttgaccaactccccgacacgcataccagtagaggccaacaaatcaatcaaggctaaatcgcgaataccttcgcaatggtcacgcatttgttctaacgcttcatcggagtatgtttctttgactgtttttccgacttttactttatgaatccgacgtaccggactcttcacaatataatcctcatcctcaagccatgaaaagaaacttgacaaaatgcgacgtatattgtctaccgtaacctttgtagcaccgcttgtctgctgataatcatttaagtaattacgcaagtcatcagtagtgatatggcgaatatttttttctattttcctgatagcattatttaatgtacttcgataatagtgcatcgacttatccgaacaaccttcgactcgtttagccgacaaaaaactatctatcaattcactattaccactgcactcttcattgttcttagacgacacgttgatatcacgaaaggcataatctagcacctttcgtaattgactcatttgctcgttgtttaaaactcccagcatagcctgctctatgtcattaatcagattctctatcatattattaataaattagttatccaattaagccgcagctatcaacgcatctcttttattctatccgtttattaaactctttatgactttatcgatatgttcaatgcactgcttcaattcaaattttgatttgtcggcttgtctatatattgcttcaaaacgcctttgttcctctatcgcaggcaatccaaccataaaatggtccagatatgaagcactaactcttgcgatttcaccatttcatcagtggtaacaagcaactttttataagcctcttttaaccgataagcagcccaaagcttatccgatatgtctcgcatttcatcaattgatggtaattcaaactcatattcaagaagtgtatctttagaaatgcgttttgagttcatcccatcagcatgtttattagcatatatccaaaaatgctcagaattaagcataaaagggatatacctaattaaatcttcacgcgaatatcctatcgttttttgtgtgtcttcttttaaacgaagaataatagaatctcctgaagttatgccatcaaagaatacaatgccagcacgtttaagatatacgtttcttcgtgctattaaaatatcatttgctttgaatgccttagccgaagtagtcaataattccgtcccctgaaaacgagtaataacaggttccccactatcgtagtgttccaatcctatgaatctgtcataatcagaccgactcggattttggacagaaatagatataggattggctattgaacttaaattaattattttcatggaataatagatttgttaaggaagaatattcttttgacaattggctgtgacttgatttccaattttccacggcctcgtcatagtttaagaattcctctgattttccctctacaaagagagatacagaaagttttccaccattggacaaaatatcttcatttgtcgctactttacaatagccagtttcatcagagaagctattataagcattgagcattctgttaatatgtttgtcctccaaataactttgtgcattctttcttgttacttcgctttctgcctcaataaataaaactttacctttccggtcatacggtttgttctcattaaatataattacgcatgaaatcatcgcggaattataaaatagataatgtcctaaagcaatgacacattcaattttatctaattcaacaagtttctttcgtaattcctcctcttcacgtctaaagagaacaccatgtggaaaaagaacagcagctctacctgctttggaatccattgaagcaagaatatgctgtaaaaaagcatagtctgcttttgattgtggtggtgtgccgaggaagttacgtccccacttatcattcataaatttttcacggttccactccttaatagaatatggaggatttgccaaaactacatcaaacttacgaagatggctgccatccaagaatgcaggatgctccaacgtgtcagcacatactattgaaaaatcctctacgccgttcagataaagattcattcgtgcaatagaagaggtcaatccatttacctcttgtccgaacacctgcacactctgccactcttcccctttgttgcgaagatagtccaaacatttaaccaacattcccccggaaccgcaagtcgggtcataaatactttcattcggtttgggctgcagtatttcagccataagctgaacgactgttctattcgtatagaactcctgagcagtatttccggcatcatcggcaaactttccaacaaggtattcgtatgcttgccccatctcgtcggcaggacaaaccttcagactcaacgtatatttagagaaatcctcaatcaacgaagtgattatactatcgggcatctttgccttgttggtccaaccatcctttgggccaaaaattccctctaatcctcctatttttctgccatccatctctttggcagggttggcttgttctatggcaataaacgcctcgactaatttattacctacattttcggttacctcacgaacatctctccagtgcgcaccatcaggaatacggatggggagatcttctacttgcatacctgcatactcaactcctccttcacacacaaaaccttcaaactgttcatcataaacatcggaaatgcgtttgaaaaaaagcaaagggaaaatatactctttatatcctgccgcatcaatctgaccacgcaaatgagtggcagccgcccaaaggaaacttttaagttcatcgagcgtaatagggtcgtccggatgacgatattgttttactttttctgccatattgattatgcgttaatgagtaatgaaaattcgttctccaatcgcttcacatcttcgtatgcttgtttgaactcagccaacacttccgcataaggacgaatttcctccttgtggtaaaccacatagcgattgggcgaaagattatactctttatctcttatctcctgcaatgtaacgattcgagaatagtcctcttcatcggagtaattttgataaagtgaatataacctatctatatcattctcttctaaaatattctgcgctctcttttgagttagaattttggaaccgtctatcatcaaaatccgtccggaatgatgagcctgtttcattcttcgtattatcaaaaagcacggtgaaagtccagttccataaaacaatttatctcctaatgtaacaacggcttctatcaaatcactttcgactaattgtttccttatttctgcttcttgatttccacgaaacagaataccttgtggcattacaacagccatacgccccttgccggaagacatagaacatatcatatgctgaatccacgcatagtcaccacaactatcactcggtgtgccatagatattgcgcttatatttatctgaactccattccgttgctccccaattttcaagagaaaatggagggtttgctataacacaatcgaatttggcgatattaccaccttgaagaatttttgggtctctcaatgtgtcgccttgcattacattaaaatcagatgcaccatgcaggaatagattcattttagcaatggccgcattcacgacattcttctcttgtccgaatatacttccacagcaaagagaatcatcgtgcatatatcgtatagcttcgataagcattcctccactaccacaagcaggatcatatacagtttcccccggttgcgggtcgagaatatgcactaataatctcacaacagaacgaggagtataaaactctccagcttgagccttactatcatcggcaaacttcttcaataatatttcataagcatcacccattaagtccgcagggtaatccttattaccaagttttcgttttgatagatgttctatcaggtcacgaatcttgctatcattgagtattgctttgttagtccatttttgagatgaaaacatagatagcaccccatacaatgtatctgggtttgctatctctatctgcctcatagcaccgactatggcagctccaagattttctgtacgctctcggacttcttgccaatgacaaccatcaggaataacaaaacgatgttgctctggcagagatgcatactccttatcaccaccacttgatattaaagcttcttctgtttcttcatcataaacatcagatatccgcttgtaataaagcaaaggcgtgatataatccttaaaattatcttggcttacaggaccgcgtattatattacaggcctcaaacaagaaattgtataagtcctgtgcacctgtaagctctttatttattgttttttttgccatctaataactctgtcaaatagtggatttgagattcctttatttcattaactcaacaacatcttccggcaacatcacattctcggaatcacctttcggagcgttcttaaggaacagcaccggaacgatggtgtagttcttagcaaacggcagcaaattagctttgcggagaagtgcagcagttagctgtttgtcattctcccctgttgtccatttgcattctccgaccaacagagactttttatcaagcgattcggccattacatcgaactcgacctgttccggcttcttatcctcattgaaaacagagccccaccagcgttttgctttgccataaactactccattaacaagatttcctgttacggcatcccgacacagtttttcccattgcatattcacagactcagagaaatgagcagtcaaagcttgttcgatcggtaagcgacgaccaagttcaatgaatgaacgattagggacaacaaactgatagtagaacgccataaacggatcggcaatcttgtagagactctttttcgcattcttctcatcaatcccgaacggaacatctttttccaaaaaaccgagatcaacaagtttcttcaatggacgcgacagattagttgcaggttcattgcatcgtgcagcaatttcggaaagacggtttgcaccagtaccgatataagacattattgtcgaagtcttgacaatatccttaacatcatcctgaagcagttttatcggctcctcataaagagccccatttacagaaaggatattatgccacatggcatcatcaagcgaaattctgttttccctcagttcccaatagcgcggcacaccgccccatacagcatactcttcaatagcgttcatcgcattaaggttcaatgcctcctgaatatagggtaaacgtataggtgtaagtctcattatctcatcagcacgaccataaagaggcgcagtagaatcaagaaacaacccatacatcatattttgtgacgaaccacaaagcaccagattatacttcaactgtttctcatcaacaagtttctgcaatacagacggcagttcaggagattgctccacaagatacggaaattcgtccaaacacaaagtaaaacgtttgtctgttcgataattaaccgcacgaaacatcgactcccaatcgggatacgacaacttctcaaaatcagggaacacctgtgctatcacttttgcaagtaatgccctctgatgttgaccttccgaacggtctgcaaggaagtatacatcattttctgacaacacccttttaataagcgttgatttacccaatcgtctgcgaccatacatcacaactaacgaggatttctctcttgcaagagcatccttcagtcgtgttgcttcatctattctatcaacaaatttcatagctcacattatgcagtgcaaacataatgtttttatagcataatacaaaattttaagctgtattttttatcctgatagagtcattatcgacttatatgcagaaaaaagtgagttttatcccttttttgatgcacgtttccttgtcttcaaactcaaatcctgtaatgttttccctaatttgtcttctttggccaaccacagaatatcatcgtcaagctgtaaaacatacaacacacgcaaatatattcctattgccactgtcggcacacctttctctattcgtgatacagtcaacggagaacaggtaacacgttcagcaacctgagccacactcagattcctgcgtaagcgagccagtttaatctgttctcctacaatcgacatcttctgctccaattttcggggcaacttagttcccattgtattctttgccatatcaatacatcatataatatgtaaagataacgctttctatttatttaatgatgtattaaagataatattgcacgaacattaacaaccatcactttctactattacacttaaagtacccgatacactcttcacacatccagccgcacaaatacgccaatctatagtaaagtttccgcactgcattgcatccacatataatgcatttttaattctcaaagaacgctgcacattgtgcaccaaatttgaagcatctacattgatactatgtttggataaatatttcatcaaatcccatgattttaattgtggtatgcttagaccacctcgtggatcaatataactgaatgcaagtccatttccatattcgctaaattccattccaacaagaggtgctttgggttctataccattcatatattttacacttctctcattatacaactgaatatgctttggaaaagcaagaaaaatattcatttcgcctgtttcagcacttccactgttgcttataataaaactcaactcctttaattgaccttctagtaactcactctcaagtttaaagcgatagaatctttcacaataagcataaaatttatccagctcaatattatgtttccttaattgggcatcactatagatagagtactgaaatctattcagagagttcaacatgtcattaaaaatatcagatggagaaatatcttcatgaattgtagtgtgtatatttgctttaggattcttggacttaatttttatcattatttcttccagttttctatctacgttcgatacacttggggcttttatacgcaatacagtctcacaattggcaaacaggatttgaggttttggctgacgattttttaactgttccaattccttacggcatcgttcgtgctctttctcctcttcactcttttcctcagaaatgagatatttgtctggcatcttaggaagaaactttaatccaagattcttagcttttatcaataatgtattgtcgtgacttatcacaataacatcatccttatgctcaaactccaaaatagagcctattattaaatcgtcacatacactacgattcaagtgataccttatcaaaatttcatctgacggatcatttatttgaacaaggttgatttgtttgttataatcatcattcaaaaaataacagccaaattttgaagcgaccgcctttgcccggacttttatcttgcttttcggtccatctttatacttgtcaatttcctttattactgtataaggtactactatttcgtattctttatcacctataatcgttccccaatcaatctgctcaaagtcaatgtaatgcaagtatatatttgtatcaagaagtaaatatttcatatgctaattttcgtttattattaatcaactcaacttcttattaaaagttaactatcaagactcatttattcattctaatagcattctgtatactctcaaaaattttcacaatctcccttttatctaaccccacctttaccgccacagcaaataaatcctcttttgtgggttcgatactatcattgattgaagtcgttcgtaagccattaattccatcgctgggcaacaggtcgtatgccggcgcaaagtgccaatcgtcgtcacgataaataaaggcaaaattctttgcatggtcatctttattgtcaatcagataattgaacaccataagacgatacactttccaaatttccgctacattgtgggtcaatgctgcacacaccttaaagatatgtaagtagtcgatacttggcagccgataatcagcacctatcaacccagcaacacttaccacatgtaattttccattcagtatacggtcaaatcgctccacgccgaaatacttatcctcgaaaagtcgtgtttccggcatctcaattccacactctttagcaagaagcgaataacagtattcatcctcaccaatctgtttggaatctctctttgcccggaacttcaccaaccattctttcccatcataacgagtaaagattttggggcgtgctccacccggagaaccacctctatactggaactcctcaattccctctccgttataattgtcgctatcaagaatctgttccgcctccaatgccaatttttcaaaatctgcgtattcttgctttgatacaacactcttgtctggacgaaattccaatgcgccgcgtccagtagaaccgaccaacgcaagacggtcaagtagtgacagtgtttgtggattgaccccgttccgctgcaggtatctatcaagaattagcaatccccacccatcaggcaaacaatcatcaaaaacaccgaatccaccatcaaacggacgaggttttgctataaataccccactgcgcaatggtaactcaaacggagatatagaaaaaccagaattgagccactctgccgaatattcaaatgcacataaactctctttggttaaagccaatctgccaaccagtctattatcatatattacctctatctgctttatgctattcatttttcttccctcttttacgtataacactctgctcattcaatacatcatctaatgactgatattgcttctgcgcaaaaagagcatcaaaatcagaaagcgcattcaaagcaaatccgacttgaagcaatcctcttaatgaaatctctcccgtctgctcaaatcggcgataagtggcgaacttgactcctgctcttgccgccaatccttcttgggttaagtccaattcaagcctccgaaccttgactcttgctgcaatctgcaaagcaatatcacttggacttgaaatattaaaagttactatattattcatagtgcccatatttaccaatcaacaaacaaaatattattcaatgcaaaaataagacttattcttgaatataccgccaaattcagagtttatttacacctcaaaatgaagaacaactttactttatccccgtattcatatatacgtgcattaaagtaaagctaacagagggagaaaaagaaatggcttcgccatgactgagtcaaaccagacctacagacattctcttttggctgcgaaaaatagaaataacctaaatcaaagacagagcaaaacacaattccgaccaaggcataaaatgatgacaagagccaaccccaaaatctgtaaaaccatctctgattttgcaactcgaatcggcgaaataatcaccgatatgccttatctttgcgaaccggaggtttcggagcaaaagagagccattttctctttttcccttcgtttgaagataaactaaggttaaaagtgttaaatcttcgatttttgacgaaaaaacaagtaaattttcgagcagtctatcttttaggctgtaaactattgataatcaattagcataatatgctgcatcggcaagtagaatcatatttagcactaattgtactttgattaattaatatgtggaaacaagtagaatttgatttacagtcacgcagacgtggctttcatcttataaccggagaaatattacgtaatctgccgccattacccgaagttggattactgcatttatttatcaaacacacttccgccgggctaagtattaacgaaaatgcagatcctgatgttcgtatggatatggaaagcattttcaaccacttagtgaaagaacgtgaaccgtactatcaacacactttagaaggaaatgacgatatgccggctcatgcaaaaagctcaatcataggaacgtcggtcacaatacctataacaaatggaaagctaaacctcggaacttggcaaggtatctatctctgtgaatttcgggattatggtggtaatcgacgaatggtggctaccattagtggagaatagcaaatgaacttgctattctattgtaattagtggcaaattgtgttacccgcaaatacttaggagacagtattgtagcatactagtctcaggattgcggaacacgaagttgccagaaggcaacagccgccgcagcagctacattaagcgaatcaacaccatgcaccatagggatacggactacgtaatcagcctcagtgatcgtttcatgtgaaagtccctccccttcgttacccatgacgatagccaatttggattcattcactaaggcaggattatcaataggaatagaatcatctgtgagcgccatagcagccgtacgaaagcctaatttacccaagtcactgagggaaccgttcatccaagcccatggcacaaagaaaactgctcccattgataccctgaccacacggcggttcaacggatcgcaagagttgcgagtcagtaatacggcatcaattccaagagcggcggccgaacggaaaatagcaccaatgttagttgcatcaaccacactgtcaatgactacaatgcgccgggcttcccgacatacttcttccatgctgcgcggctcggggcgacgcatggcgcagagaactccacgtgtcaggacataacctgtcaacgtagcaagtaattctctactgccagtataaacaggcacattttcgcaacgttcaatgatttcagcagcatcaccgacaatatgtttgtactcgcataaaatagctaaaggttcataaccggagtccaaagctctcgtgataaccttcggactttctactataaaaatccctttgccgggttcggtacggttacgtaactgagtttcagtaagagtactgaacacctcaactccgggatgagataaagatgatatttcaataacaggcatactactgcttataactttcaattaaacatacaatcgcttctttcacataactgatcattgataaatggctaccttaatgactccgtccaatttattttcaaatatacgataagcttcctcaatctcgttcaacggaaatctatgtgtaataagaggagtagtatctattttgccttcctcaatcagattaagaatctcggcacagtcacatccgtccactccacctgttttaaaaatcaagttcttgccatacatatcaggcaaaggaagaatttgaggctcgtcataaagagctacgatagtgacaacagcattaggacgggcacattcccatgccagacgaaaagtatccttactgccggctacttctaaaacaacgtcagcaccaccatgttcactgttttgaatcacaaattccttgcagttttcaggttccaccaccagcacgtcaggataatgttcacgcacaaaacggattctttcaggagacttttcgcagacaatgatacgcctcggtttcttcaacatcacacacaacaaagtacagattccggtaggaccggcgccaataataagcacagtatcatcctcggaaatctctgaaatacgggttgcccaaaaacctgtcgcaagcacatcacccacaaacaaagcctgttcgtcgctgactgtatcaggaatacggttcagtccctggtcagcataaggaactctgacatattctgcctgaccgccgtcaatgcggcaacctaaagcccatcccccgttcgggtcagtacagttgttaacatacccccgtctgcagaaaaaacactctccgcaaaatgtttcaacattcactgttactctatcccccggcttgaccgaggtgacatcagcccccaccttttccacaacacctaccatctcgtgcccgacggttattccgggtacggcacgcggcacactaccgtgcttgatatgaaggtcactggtacaaatactgccaagagtcacccgtacaattgcctcccgtgaatttactatttccggttccggcttctcccgtaactcaaattttccgtgttcaatatatgtatatgtaagcataatatcctcttcattaattaacagccccattccggtgcaaagataatgatttcatcagatccatatttatcaaatgaaagtcaatccggacactctcataaaactttcatataaaagagtcttcttcttatcattagtttttgacttgttgatcttctattataacacgctttatctctcgtgtatctttagatttactaaaaggtacgactctataagatgctttctgtataacccccaaaccaaagtcaggcaaaagagttttatttttagaataatcattatcaatcatcatatcccatgttgctccaccagtcaaataaactttgaaactatctgcacttatcatagaaataatatctgtcggattatacaaatgaaacaaagttctaacatagtaatctttctgtatttctccaggtttgtaattgttactatatggaccaatcacatcgaattcataagacggatgacatatcgcaaattctattccatttctcggaaatgaggatcttacttctattttcttattgttagatattactttaagatctatttgccttgacgcatcatcaaattcggtttctgatacgacattctcttcagaattcaaataaagtttccactactgtcccgtaaaagtggataattagttctttgaaattattgaaatatagtcaattacgcggttttttaaaatgaaacggacttgattttgcaactttgcagtctaatacaaatggctgctatgttccaagacaaatacgtattctctcaattaaccgcttttctgaacaggactcagttcaacaactatgttcgcaagtatgatggcaacagatatgtgaaacatttcacttgctggaatcagatgctcgcgatgatgtttggacaactgagtaaccgtgaaagcctgcgagacttaatcgttgctttcgaggcgcatagggccaagcaatatcatcttggtttaggtcgtgaaccgatagccaaaacaactcttgcgacagccaaccagaaccgtgattacagaatcttcgaagactttgcattctatatgatgaaggaagcctgcgagaagcggacgaccaacatccttgacatttccggaaagaaatatgcgtttgattcaacaacgattccgttgtgtcttgcaacattcccatgggcaaagttccgaagcaagaaaggaggggtgaaagctcatgtcttatacgacattgaagcacaagttcctgctttctataccgtaaccactgcttcaaagcatgattccacagcaatgtcttcaatccattatgaaccaaatgcttattatatattcgacagggcttatgactcctttaaagaactctataggatacatcttacagactctttctttgttgtcagagccaagacaaacttaaagtataagacagtcaaatggaagcgaagaatgccaaagaacataatgacagatgcggaagtgaaactgaccggatatctctccgagaaaaaatatcctgagtcattcagactcgtccgatattacgacgaagaggatgaccgtgagttcactttcttgacgaatgcaaaacaactttctgcactggatgtcgccaatctttataagaaaagatggttaatcgagctgttcttcaaatggctcaagcagcatctcaagataaagaaattctggggcacaacagagaacgctgttcgcatacaaatcagtgtggctattatcacgtactgtcttgtggctattgtccaacatgatatgaagttgaaacgttcaacctatgaagttttgcaaattctcagcatatcattgactgacaaaacccacttgcgtgacctgttcgacaagactaatttcaatgatgtcaaagatctaaatgatcccctgattccggggctttttgattaattgtttaactcgtcccattttaacgggacactaatgtaaagtttccaaaaatattccgatacaactcctgctatacaatcagccaaaatacgttcaggagatctttcatgcatagaattgtttgcagcaccaggatttacttgccgtgcaagctcttccgcctttgttctaagcaaatccataagatccttgtcttccgaagaatagtttagttcgtatactaccacttcaaaaggtgttctcctacaagtccgaggatatcttgcagtacaattaataaccaaattctctattctcataagtctattattgtttaaccttgccctataaatccatccaactgtttcttgatattctcaaaattctgattcaagtcaagtgtcctgtaatatatgacgtttccgtccctaaatgtcgtctgtccatcaggcgttatatcttcttctgtcttggcatacaataacatcccatccaccttccccgtatgattagtatcgtaattcattacataagaatgaatctgatataggttattagaatggatagtccttttgtcaaattgggactgcattgacctactataatacttggtatcaataatcagtgttcgttctttaaatgtcagcataatatccgtccgcatgataggaagaatactggaagtcgactgttctttgtcaatattccagtctatttgagttgcctttgcttttaattccggataatgtttccgataatactccagaacaaacttctcgtaaagtctgcacatatgttcatcggaaaattccctcattttataagcacctctttccgtagtcatcaacatcccgtcgagaataaaatagcaaacatacagaagcatccggtaagtcttgcaatttctatcaaagcgcatagtagtccagtttatcgtcaggatatcaacggcctccacgtcactaaagaagagcataaggcgcttcaacgcagccttcctgtccgatttgactttcggatgtttcagcaagaattgaacagttgtttttaatatctgattaaacttgttgttctccgataattcatcgtactcacaatcaattttctgttgtttccgcattagattattgaccgtaccacatatatcaagcttccctttcaatgtggacaacgaaccatgacaggaaatatattctttatgcaacccctgttttaattgaaacgaaatgccacgaagcagaatttcagcaaacaaatcatgaatctcatcaaattcttcaccggctatttcttcatagttgttctgcttaagctcctgaaaagcataagtcagcatatagtagatattgcgaatgaatatacctttgtctattgtcattttatcaggctcaataacttgtccgtttcttctttgaatttcttatcattgtcaaaccaatattctcgtaacataggggcaatatcatattcaatcacattctcaagccacatattatcaatagattcccggttacagaaataactatgaccgatacaaaagccttttccgagcgaatcatccttagcaatctcaatattcagggctttgacggcatcaatcactttattaaagacttcacaatcaagattttcctgatactttttgaaaccaaccgaatcaaatcccggtgtcatatcaaagaaactgaaccgacggcgtaaagcgtaatcaatcatagccaggctacggtcggccgtattcatcatacctataatataaagattctccggaacagaaaaatactcatcgttatatgcaagacggattttatgcttttctccccgataatcattttcgatgagcatcagcaactcgccaaaaatcttgctcatatttcctctattaatttcatcaataataaagaaatacttcttatccggatcactttgggctttccggcagaaattatagaatacacctcgtcttaattcaaaaccgccatcttctttcggcttatatcccatcacaaaatcttcgtaagaataattctgatgaaactggataaactctactttagttctatcttcttctcctataatagaataagccaggcgttttgccgaatacgttttaccgacacccggagcaccctgtaatatgatatttttctttgccagcaacagacttctcaacttggtatattcctctgattttataaaaacatcatccaggaaattattcccggaatatggaggattacgtttgttgactgttatagggttttcatcacggatcaaatccgccaatacgttatactcatcttttgttaatttgaagaacgacccattcttattcttcaggaattccataccgctcaattccggtatatcctttataaccgaataatcaatcgggttcagcaagctttcggtcttcttgaaatatattttttgtccatcagcagctttgactatctccgctatagctaccacctgcttcacaggagtagcttcatagcctataacaatatcgccttctcttgcatcaataaaattttgaaatatccttcgctgatttccactatcattataaagagtatagtcttgtattttaccaaccggagctttcgaaaagctccatatcttaggactagccacaagccaccaatattgcttttgagatttatcctcaaatagtttctccaaagattccacataatccggatacttggttatatcggtcaaggtcttttggacattcttacctatattctcccattctccggcattcgtccattgcattttacgaacattcttaaaatcaggaaaagactcatcaaaggcataatcaccttccacaatcccacgccctattatttgattctgccctttcttgactataacaatatcaccggcctgcatctcatgagcgaactcccataatgccaggctgtcatttttaaacgaggcctccggcttatcatatatttcctgcaacctagctgccatttctttctttgaagcatattccaaaagattgcccatttcatcccaaccaatacacattatgttttgagatagacacacatcccatttagacgcattctctcccggagcatataaccaaaccttatgcattttatttaaattttagtttcatcatttcagtctgtttttaagacttttacctttactgcttactttacaatgtcctgtttttcatcaattcccattccttcaatcaacttcaagtccttcaattgcgccaatattcttctccttatagccaaactaacgttgaggcattcacccaatccaatgtgtgagagttcaataatgcaattaaaatctcctagctacaaagatacaaaatagttgttccgcaatgtagtaaacacctatgttttttataatttaaattgactaaccacattacagtgaatacttatggtcaccaccaataatatttatatcttaaaatgacattatgtacaaataaaacaatccaaacactttccattatcaaaataaagtcctacttttgtagagaatatagatgtacatattcaaaataatcccgcaaataaaataaaccctacaaaatgaaagaagaacccgacagtctgtctgtcccctacaatttctcccgttgtttcaacgaccaatgtccacaagccttgaaatgcctgcgctacatagctgccaaaaatgaaataactgattacctttatatctctatcgtcaatccggcacgttatcctgcagacggaaaccaatgcgaatgtttcaagaccgctgtcaaagttcatgtggcatggggactaaaacgattgcttgacagaattccttatgaggatgcggtcagtatcagaatgcaactggtgggacactatgggaaaacaggatactaccggttctaccgtggagaacggggacttatgcctaaagaccaagcttatataaaacaaatattccgtaataaagggataaaagaagaaccaacttaccaacgctacacagaagaatatatttggtaagttgctgtcatctgtcacaaattaggggggtaatagttttctctgcgtgaaactaaagttccagctaagagaaactatagtttcatcagtaagaaaccaatggtttcaagcaattggaactagagtttcaagcgtatgaaactaaagtttcaaaccgcagaaccaacagtttcgcaccttgaaaccgttggtttcaaggcaggacacaactcataagtacggaggttacaaattgaacgacttatctttctatggttaaatgcgatacctccctatttcacaagggacagctcttctatataacggaataagcaaataaaatctaatttctttgtttacaactttgtcataatagaatttaagatgttatccctactttttcaaattactattcatacctttgtgacttcgataaagaattagtaacctattaaaaagaaaaaattgattatgcgctcattcatcgtgtttctttgcttcattcccgttctgctgttttcctgccggagtgtttctcttgaaacacaactgaaagaagctatcaaagacaagaaagctgaaatagggattgccgttatcatagatgaaaaagatacggtaacagtcaataatgatattcattatcctttgatgagtgttttcaagtttcatcaggcgttggcgttagccgattatatggcgaaacggaatcagtcattggatactctgctaaggatagagaaatcggatttgaaaccggatacgtatagtcccttacgggataaatatccgcaagggggaattgagatgagcattgccgacctgctaagatacacacttcagcagagtgacaacaatgcctgcgatatactttttgattatcagggcggaccggataccgtgaaccgatatatccattcgttaggcattcgggattgtgctattgtcggtacggaaactgccatgcacgaagatttggatttgtgttatcaaaactggagtacaccattggctgctgccgaattaatggagattttccgacgggaaccgttgtttgcacaagaatataaggatttcatctatcagacaatggtagaatgcaagaccgggcaagaccggctggttgctcctttagcggataaaggagtggtaataggacataaaacggggacaggcgaccttaatgccaaaggacaacagataggctgtaatgacatcggctttgttcttttgccggacggacgcacttacagcatagctgtctttgtgaaagattccgaagaaagctttgcggaaaacagtaagattatcgctgatatttcacgtattgtttatgaatacatgatgcagtctgccaaataaagagagtaatagttaatgataaaaaagaaaaatcagattaaaaatgaaactacaccacatcgccatttggactttccgtttggaagagttgaaagagttctatgtccgcttcctgggtggaaaaagcaatgagaaatatgtgaatcccaagaagggattcgagtcttacttcatatctttcggtgaaggtccttctttggaattgatgagccgtcccgatgtacagaatacggtggtggaagaaaacagagtcggattgacacatctcgctttcacgtttcccggccaggaggaagttcttcgtttcactgaggaaatgcgttccgaaggttacaccattgccggtgagccgcgcacttcgggagacggctattttgaaagtgtcatccttgacccggacgggaaccgtatagaatgtgtatacaagaaagaatatggagaagaagactgagacagaggaaactgtgacgccccgtagcctcgagacggtacggctgctgatccgcccttttcaagaagaggatgcggatgcattttttgcctgttgccagaacccgaacttgggtaataatgccggttgggcgccccacaagacgatagaagaatcgcgggagattcttcagaatgtgtttatcggccaagagaatatctgggcgatgatactgaaagatgcgcagcaacttatcggttctatcggaatcgtccccgacccgaaacgggagaatccacaggtccgtatgctggggtactggcttgacgaagcgcattggggcaaaggatatatgacggaagcggtgcaggctatactcaactacggtttcaacgaactgcaactcagcctcatcaccgccaattgttacccacacaacaaacggtcacaacaagtgcttgaacggaacggatttatctatgaaggtgtactgcatcaggcggaactgacttacaacgggaatatattcgaccatttgtgttactatcttccgaatatatgccagcctgccccgcaagactatgacgagattctggaagtttgggaagcatcggtacgccacacgcatcattttctcacggaagaacatatccagttttacaagccattggtgcgcaatcattatttaccggcggtagaactatacattatccgggatgccggcagaaagattgtagctttcatgggactgagcgatgaactaatcgagatgttattcgtatatcccggcgaacagggaaaaggatacggcaagcgattactggaatacgctactcggaaaaagcagttggataaggtggacgtaaacgagcagaatgaaaaagcactcagcttctatcttcacatgggattccaaatcatcggaagggacgaaacggacggtatgggaaaaccttatccgatcctgcatttgcagctgaaagaagcaactgtcgaaaaaagtaagagtaaaggttaaccctcaaaaagaaagttacatgaacctacgtgcgagattatccgaacgtgtgcatattgaagatattagagaaatacttcactttatacaagatgacgaacaactcagagaagaagtctatcaatttatctttgacgaggacgatattgtctcttatcaggcattgtgggtttgtacgcatttctcaaaggaggatgtagaatggttgagccggcgacaaaacgaactgattgacgcggcaatgacctgtccgcactcaggaaaacgaaggatgctcctgaacctgctcagccagcaaccggcagccaatccgccacgaatggatttcctcgatttctgcctggagcgtgtcataagccgacatgaaccgggcggtgtacaatctctttgcataaaacttgcctatcaactgacctgttccattcccgaactgcaacaggaactacgcacaatgctggaaatcatggaacccgaattattgaatcccgccattcgtgctgtacgcagaaataccctaaaggcgatgaaagcaaaaaaataacgaacaaaaaaacaagaagctgtctcccgctacggaaaacagcttctctcttatgtcgttatgaattaaatcaattgaaatagtacaagaatacggcaattccttcaagagcctttttgggctggtctttgatttcaatagcaaatttgatttcagcctttgccacaccacgcaagttggtcaatgaatgaagggtagtcaccagacggatgctttgtcctgacaacacagcctgaccgaatttcattttgtccatgccgtagttaatcatcattttcaggttattcacctggataatctgattccacaggtaaggaagcatggataatgtcagatagccgtgagcaatcgtgctgtgataagggctgtctactttggcacgttccgtatccacatgaatccattgatgatccagtgttgcatctgcaaaaaggttgatgcgttcctgtgagagttccacataatctgaaacacctatttgttgtcctactagcttttcgaattcttcgtacgaattgataattactttttccatagtcttatcgctttatgggggttattataaatgttaatcggggacaaaaatagaaaaaataaactgatatgccattaatttacgcaataaaagcaggaacaaaagaagtcggggatagtttacaaatcaggggcttgtttcaaaggttgttccaaggttcgcctcaaggcttccgacaagatactgtacccttttccgttcagatgcagatcgtcaatagtgagttcgggattcagccttccgtcctgcaataaacggtcgaacacatccagatagataatgtccgttccctccagtttcctgtgtattttctgattaagcatacagatgaatttattcaccgacgtactgtaatcatcgtaatcattgcgtgggaagatacagaataagtaagtctgccgggaaggaacagccaacactgcttttacataccgttctacatagccgtccacattttcatcgttcaactgatagatgtcattacttccgaactgaataactacctggcaatccgatgtgtccacatcaaacgcttcgacataagccaatccctcgccgggcacaccatagttcaggcattcccattgcggaaaatagatattcaatgcccagaacgctatatgactgttacctacaaaagctagtttcgttttttcttctatcttatccatttcattcaaacattcattttatttcatttaaactccagaacaaatatagaacaaaattcgcggatttactttacttttgcaccgataatcacattcatatataaaccgatgatacattttttcaagaagagcgtttctcatattgcgctaccggagaaattcacttatcctttccactatacgccgcatccgttgtgcgtattagcggcggaagaagtgaaagagtatatttcaagccggaaggaatggcaggaagaattgacgcttggaaagatgttcggggtattgattgtacaagagacaggaaaaaggacaagaaaagggagggaaaaagaaacgggagaaagtaccgataaagacgaagaaggcggaatcggttacctggcagccttttccggcaatctggcagggaagaatctgcatacttattttgttcctcctgtttatgacttgctccaaccacaaggattcttcaaaatagaggaagaacagatctccgctatcaatatccgcatcaatgaattagaaaacagccgtccctatctggatgcaaaagaaaggtggaagaaagaaacggaacaggctaaagcggagttgagtcaagccaaagcagagttaaaagcagcaaaggaggccagagaaatccgccgtcagtcctcgcccggactttccgaagaagaacaagccgtcttgattcgggaaagtcaatatcaaaaagctgaatacaaacggaaagagaagggatggaaaaaacggctggaagaacttgaaaccgaagttaaccgtttcaagacggacatagaaagcttgaaaacagaacggaaagaacgttcggcggctttgcaacaaaagttattcgggcagttccggatgttaaacgcgaaaggagaagtgaaagacttatgtacaatttttgagcagactgttcagaaagtacctcccggaggtgcgggtgaatgtgcattacccaagctactgcaatatgcttatcttcatcatctaaagccattggcaatggctgaattttggtggggggactctcccaaaaacgaaatccggcgtcatggatattactatccttcctgtaaagggaagtgcgagccgattctacaacatatgttacagggactggaggtagacgaaaatccgctattaagcaatacgcataaagacacggaactggaaatcgtgtttgaggatgaatggctggtggtagtcaacaaaccatccggaatgttatccgtgccgggaaaggaggaggatatggattccgtttatcaccgcctgaaagaaaagtatccggacgcaaccggaccgatgatcgtacaccgactcgatatggcgacttcggggttactgcttgttgccaagacaaaagaagtacatcaacatttacaggcgcaatttgagaacagaagtataaaaaaacgatatatcgccttactggacgggtgcataacagaaaccgaagaaacaacaaatcaaacaacaggaaacacaagaaaaacagaaaaggtaagagcaacagaagtaataagtacaaccggaaaggcaggaaggatcgagcttcctctctgtccgaaccctctcgaccgaccgtgccagagcgttgacgaagaacatgggaaggaagctatcacagagtatcagatcatcacaaactcagagaaacatacccgtatcgctttctgcccgttgaccggacgcactcatcaactacgtgtacacgccgcccacccgaaaggtctgaattgccccattctaggcgacgagctctacggaaagaaagcagacaggctatatcttcatgccgaatacatagaattccgtcaccccatttacggagacatcatctgcatacagaaagagcctgatttttaagaaaaagactcttatgccatgaaccaaaacctttttgaaatgtatataggtgtaactattaactttcaaaaagaacctgactatgagtattaaatttcgaattacaaagtacctggctgtatctgcattagccatgctgctattaggagcctgctccaaaaacaacatttatatcgacctcgccgatcctaacgaagaaaacggtaacaaccacccgtccggcaatgacagtggcaacgacaacggcaatccttcccaaaagggtactttagttactttcagcgcatccgtagaaggaagaaacatcacccgcgccatgtcgcctatgggcaagggattacaaagttggttgtgtgcttacctgtccaatacctcgaacataatcaccggagatcctattgccgaaggtacatacatcacctcctctcccggcgtactggcaggcaacaacggatataaaatgtatcttagcaacaacatctataatttctatgccgtttcctgcaattccaagaatcccgccccgacctttaccaacgggatatccgcccctttatccaatggagtagactatctctggtggcacgctacgcaccaagacgtgacaaactcccagatcaacattccgatcacctaccagcacgcagctacgcaaatagtagtcgccttgtcgggaggtgccaatataactctcaacaagattatctccgcctctatcactccgccgaaaccgggcgcagtcatggatttgtctaccggaatcatcacttcggaaacaacttatgacaaggccgctatcatgggaatcaatgactttaccgtacaatataccatgttgcctgtgaaaagttccttacccatgactttaacactggaattactggtcaacggagaaagtttctcacgcacctacaccactccgcttactccccccaacagtctgctagcggcaggaaactcatatcttttccgggcgatcattgacgaaaactccttaacattcgccaatgtaagcgtaaaagaatggactgaagtagacgaaagcggcaacccgctatatccgatacaagactaacctctctccggttgcgcaagccggcaacccctatgccactgcttgcgtaaccgaagcgtttgtaagcacctgcttcttcaacctcttgtagacatagataaaagcaggaacaaggaacaagtccgcagctatccaagccaacgggtcgccgtagcagacagccagaaaaccgaaagcaggaaccgcataaaggctgacgagaatacgggcaatcatctccgccactccggaaaacatagcaagattcgtaaaacccactccttgaatggtataacgcaagacacacaacaatccaagcacagggaagaacatacaggaaatatgaaggaaaagttccgtatccagtaaaatctccgtttccgaggggtctacaaaaatcaaggcaaagtatttagctcccgacatcaggagcacgaaagtaaacgccgcatagataatcatcatcaagacgcttgccttaatccccagccagatacgttccggtttgcccgcaccgtaattctgtccgctataagtagccatagcgattcccagactctcgaacgtacagataaagaacatcttgatacgcatcgccgaagtaaaggcagccacacaagccgtacccaacgcattgtttgcgctctgaagcatgatactaccgatagccgtaatggaaaactgcaatcccattggtacaccgatataaagcaacgtcttagccagcttcgactggaaccgccgttccttcggagtactctgcaaaatgtcaaacttacgatacatataaatataacagagcaccgccgaaagtccctgtgagataaccgtagcaatggcagctcccgccactccccagccgagcaccaaaatacaaaacaaatcgagcacaatgttcaacaccgtagagaggagcagaaaccagaaaggcgtcttactatcccccaacgcgcggataatgctcgaaagaagattatagaaaaaagtaaaaggtaccccgataaacgtgacaagcagataagcatacgccccttcgaatatattctccggtgtacgcatcatctgaagaatatccgcacacaagatactggtaacaatagcgatagtgacagacatcaccacagagagcttcagactgacggatatgtaactgcgcatcgtgctataatccctcgctccaaacttctgtgccacgggaataccgaaccctccgcaacatccgttgcagaaccccaagataaggaataccaccgatgtgctggcccctaccgaagccaacgcattaatacccagaaactttccaacgattgccgcatcgacaagcgagtacgtttgttgcagcagattgccaagcaaaagcggcagtgtaaactttaaaatcaacggtaatgccggccctgccgtcatctctttagaagttgccatacgtctatgtcctaaaattgcgcgcaaagatacggaaaatcccatgaataaaatccggattcaccttcctcttttattgacgtaaatcaaaaaacgaggaaacgcttatcataacggaaaacctaccgtttcaccagccgcttgggcgacccgtgccacgaacatcccagacagaacacctccgtcaggtcgaagccttccatagaatcctccgggtatttaggcacgacttcaccattttcgagtacatataccaacagtctttccccttgttcattcttcacatacatagcagcaattttacattgcgggcacaataactttttcatgccgcaaagatacattatctttgtgaacccgatctacaaaaccggataaaatgaagaaaaaccgtattgcacgcgaaaaggaaacagtggagctgatgatacgcctctactgtcggaaaaaagaaaagaataccgttctttgccccgactgcgaagaactgctgcgctatgcacacacccgtctcgaccgttgcccgttcggtgagaaaaagagttcgtgcaagaaatgtaccgtacactgctacaaacctgtcatgcgtgaacggatgcggcaaaccatgcgcttcgccggaccgagaatgatattctactccccttgggccgccatacgtcatttactaaacctataaatacattacccattcagccatataccattatgaaaagagccataatcataggagccacctccggcattggacaagaagtagccaaaaatcttttgagagaaggctggcaaatcggaatagccggcaggcgtcaaccggcactcgaagacttccaacgcattgcaccggaacaaataaagatccagtcactggacgtcacccaggcagacgctgcggaaaaactgaacacccttatccgtaaactaggcggcatggacctcttcctcctcagctccggcatcggtttccagaacccggaactggatatcgacatagaactgaacaccgcacgtaccaacgtcgaaggatttacccgcatggtggacactgccttcgattacttcaagcagcatggcggcggacaccttgccgttatcagttctatcgcaggaaccaaaggtttgggtatagctcctgcctactccgccacgaaacgtttccagaatacctatatcgatgctctcgaacaactctcccacctgcaaaaactaaatatccgcttcaccgatatccgtcccggattcgttgccaccgccctactaggtgacggtaaacactacccgatgctaatgaaagcagacaaagtgggccaagccattacccgcgccctgaaccgcaaacgccggacggtaatcatcgacggacgttaccgcgtgctcgttttcttctggcgactgatcccccgccggttatggaaacgcctgcccgtaaaaaccaaaagctaaaaagagcaagataggataacactattttcgggaaaaaactctatatttgtccacagagacaagagatctgtctatcattcccttaaccaactaaagaactaaaaaatggaacagaaaatttgccagtgttgtgccatgccgatcgacgaatctacattcggaacagaagcggacggtagcaaaaaccaagattactgcctgtattgctacaagaacgggcatttcaccaaagactgtacaatggacgaaatgatcgagcttaacctaaagtatctcgacgagttcaacaaagattcggaagtaaagtacacgatcgatgaagcacgcgccaccatgaaagaattctttccgcaattgaaaaggtggaagaaataagtaaaaacgaaagcacaccgtttctaacaatccgttatccacaattaaacaacaaggattgttcagattttcctttttatcatgcattatttcttcttatcggttttttattatacatttgtaaacgtatattctgtcattaggattgtaaaacaatacagcaaatcataaaaataacagttcagtcctgattacggataaaaataggaaacaaatgaaacaaaccaattcactttcttctaaggatgagaatatgtcttcagaaaatggagcggccggattgacacaagaccaactgctgtttacagaaaacatctacgccagtctgccaatgagtatcgaagtttatgatgctaatggtgtcctacgtaaaatcaacgataaggcattgaaaatgtatggagtctgtgaccgtacaacagtcatagataaagtcaatctttttaacagtccttatatggacgaggaattaaaatccaagatacagagaggtgaggatgtcactttagaatttgagtatgacttcgaccgtatcaacagcgatgcctatttctgcagccaaaataaaaactctataatttatgaagcccaagtagttccggtattagccgataaaggtactatcatcggccatatattgctttctaatgacgtgaccagtgccaaggaaatagaatttcgcacggaagaaagcaagaagaatctggaaatggctatggaagccgccaacatggcttcatgggtatataatgtgcataaaaagacattcagcacattacacggaaacgcgctagcaaaagaagaaatgtctttggagcagatgcaaagtatcctgcatccgcaagaccgtatacagttaatgcaactgttcgctcaactgataaacaaggaaacgcaacaggtgcacaccaccctgcgtttttataacaaggaagaaaggcaataccgtcactacgaaagccggatgcgcttatcttccgaacaccgtggaaagttattgattgtcggtacacaactggatgtaacggataaagtgcaaatgttgaaaaagacacaagacctgacaacaaagcgcgagctggccatgcaggtgagcaatatcgtacattgggacttcgacgtatccacacagaagttcgaatcctacaatgatccgatcaacgactacgcccccaacaggcttgttactctcaaagaatttgaaagtgtcgtacaccctgacgaccgctctacctatttcgatgccatccaatctatgttgtcaggcgaaaacgaaaccgtcaacttcacttgccgcatgcaaacaaaatacgatgaaacctggcaatattgcaatgtcatcggcgttcctttcgaacaggacgagaatggaaacaccatacgcttcaccggcttccgacagaatatctccaagctccaccgcctgaacgaggagcttaaagagagaaattataaaatggagcttacgttcaagaccgttggtatgtcttactgggatttcgatgtgacaggccggaagttcaccgcattcaatgatcccgtcaacgattatcaccctgaaactccgattgatgtcgaccaatatttgagcgctgcccacccggacgaccgggaacttgtacgcaaatatttcgagggaatgatagaaggaaaagagcaagaattcaatttccagtaccgttccaaaacgaaatggaataaggaatggcagactttaatcatcaccggcattcaagtggaaagagacaaaagaggaaaaataatccgttacacaggcatcggcttcaacaatacgaagtgggagaaaatggcacaagagctaaagatattgaaagacaaagccgaactttccgaccgcctcaaatcagccttcctggccaatatgagccatgagatacgtaccccgttgaatgccattgtcggtttttccggcctcatggtaaattgtgacgaccccgaagaaaaagcggaatacatggagattatcgaatcgaacaacgacctgctgttacggttaattaatgatattctcgacctttccaaaatcgagtcgggcatcctcgaacgcaagagggaaaagttcaatctggcaaaagtatccggtgagctttatacaatgatccaaccgaagatcactaatccggaggtagagttcatcctcggcaattccggtccggattgctggatattcctggacagaaaccgcctcaaacaggtctggatgaatttcctcaccaatgctgtgaaatgtacgcatagcggacatatcaaaatgggatacagtctcgaaaacggaggaatcaaggtctatgtcgaagattcgggtgtcggcattccgtatgaggtgcagaacagggtgttcggacgattccagaaactcaatgaattcgcacagggaacaggactcggattagccatttcgcgggcaattatcgaaggcgcaggaggagaaataggatttacttccacgcccggtgtcggttccactttctgggcatggattccatgtgatgtaagtatgcaggaaaacatcgatccgaaagcaacgccacaacctgcacaagcacaagagacagttcctttgaaccactccatatctttaaaaggtataaacggaaaagacctgcaaatactgattgccgaagataacgacagcaattactcgttagtgaaacatatcctcaaggaataccagatcacccgtgtggtgaacggagtggaagcggtggaaaaagtacgcgatgaagagttcgacatcgtccttatggatatgaaaatgccgattatgggaggtttggaagcgacacggaaaatcagggagctgaatcctatcatccccattatcgcacttaccgccaatgccttcgacgctgacagggtaagcgccatggaagcaggttgcaatgcatttctgacaaagcctttgaaaaaagaagaactacttgaactgttctcattcaagttgtaacaacatcacaaccagttctctatatagttgccactcggaacgcacatcatattcatatccttttatcctttatccagttccgggtggcgctccaaccaccttaccgcatacgagcaggtagctttcggcttcataccgttggccagtgcatagtcataggcagctttcaccaatgtggcggctattccgcgcccctctatgggacggggtacaatcgtgtggataatatcgagcgaatcacctaaaaggcgatattgtacaaaggcggtgcggccgtccacttctgtcttgaacaaattctgttcgggctgatgaataatttcgcactccataatcttgtttttgtaatccataatcctgttttccggttgcacggcgtgtcgcagtcaggctggtagcctttagaattgctcaatccattgcaaccggttggtatcgtatccgcggcgttcggcggcggtgacgagttttttctttatatcctccggcagttgcggagtccggctcagtatccagagatatttgtcggtgctactgcctacgagggcgtagttgtaattctcctcatccagttcgagcacgtaatagtccgagtagaagttgaggaagaaagagactttcagtttgcccggctgcgcggggtcgggaatcttggcgtgcccgttggcggtcttgcaaatatcataaggggaattacgtttgcatccccggttctctacgcgaatcaggccgtcgggacggagcgtgtaagtggcggtcacatcgacaagtccatgctcgaaacggttttcgtaacgggcaatctcgtaccaaagtcccatgtatcgcttcaggtcaagtatcttgacggtggtatggtcggttcctttgaaaagacgttccacgttgggaacggaaaagcggaaaccggcttccagcagacgtgtgggacggactttctgaccggctgtgagaaacgaagccgcctcgccatagaagatacggaaagcacgttgcggagcaacaatcgtcgtccatgcctgataggctttacccatttcgtgagtaaaatcgtattgcgagatctgttgcggggcaaccagattgaacacaccttgcgtctcctcatgcccgataaaaaactccatggcacggcaaagatcgtgcagtgctatccacgggaaggactgggtgccgggaccgatagcggtagccaccttcgtagcctgcaacgggcgtaacatctgctgcatcgctcccccgtcgggagagagcacgacaccaaagcgggtaatgacgagccgtgtaggttcgggacagcgtttcgcctctttctcccacgcatagcaaaggtcagacaggaagccttccccacgggtacgggtgtattcgtccgcttccacttcgggagggtaataacctacggcggaagccgaaatcatcagcttcggtttcgtcttgacggcattcagcgcacggacgatgcggtgggtgacgacgatacggctattgaaaagctcctgtttatattccggtgtccaacgcttgttgataggtgcgcctgccagattaatgactacatcgcaatgcgccagcgtttgaatcaacagtccggacataccttcgcgaaacatcgaccttcccagaggaatcacccgatgtccgcccttttcagtcagatagctggaaagatgtttacctatatatccggtagctccggtcattgctatattcatcttgattctattgtatgtttttaactctactagaaaaacgtataaaatgcaggaaaagttctttgaaaaaaacaaaatgaagttatctttgcaaggaagacgtaaacattgaaaggaaaaacgagatgatagaagcccccgaagcccgcattctctgccggcaactgaacgaaacggtcagaggaaaaaagataacggacgtgtacacgcagttcagtcctcacaagtttgcctggttcacaggcagttccgaggagtatgctgaacagctgtccggcaagacgatagaccacgcacagtcacagggcggcatggtggagatcaccataggagacaaggttctcatcttgacggacggcgtgaacctgcgctatctggctccgggttccaagttacccgccaaacatcagctgctcatcgccttcgaggacgaaagttgcctcgttgcctccgtgagaatgtacggcggactgatgtgctatgacaaggacgctgccaacggagtgctctccaattattacctgacagcgagaagcaagccgcaggtcatgtccgacggtttcagcccggaatatttcctcggacttatcaatgccgacagcgcacagaagaaatccgccaaagctttccttgccaccgaacagacgattcccggactcggcaacggtgttttgcaggatatcctttaccatacacatatccacccgaagaaaaaaataagcggactgacagacaaagagcgcgaaaatttgttctatcagataaaagagacgatgaatgacatctaccacctaggcgggcgaagcacggaaagcgacttgttcggagcgaacggcaaatacgttgcctgtctctcaaaagataccgcaggcatggcttgcccccgttgcggagaaaccattgtgaaagagaattatctgggcggcagcatctactattgcagaggctgccaaccactgccgacggcgtagcgccggaataaggtttcctccttgcggcgtgatcgcgtcaggctcaaggtttacttattaattaaatgatgaattgaaatgaagaaacagattaaaatcaattatatccttacacttatcttagtgttttgtattggtgccaccattcctacattgataggcagcagccaagtcaacgaacaacattccgccaagtcggaagtgccctattgcgtcacttcgcccaccgtacccgcccaggttacctttgacggtgaaacgattgacctccgccgctacgaccgccgcgaacgaatggaccgcgagatattggctttcacttatatgcactccaccaccatgcttctgattaagcgtgccaaccgatacttccctatcatcgaaccgatactgaaagcaaacggtatccccgatgatttcaaatatctaatggtgatcgaaagtaacctgaacagtatcgcccgctctccggcaggtgcagccggactatggcagtttatgcccaccacgggacgcgagttcggactggaagtgaacgagaatgtggacgaacgctatcatatcgagaaagctaccgtagctgcctgcaaatatttcaaacaggcatatgccaaatatggcgactggatagcagtctccgccgcttacaacgcaggacaggcgcgcatctcctcccaactcgaaaaacagttggcaagccatgccatggacttgtggctggtagaagaaacttcccgctacatgttccggttgctggcagctaaagagattttcagcaatccccaacgttacgggttcctgctgaaaagagaacatctctacccgcctattccttataaagaggtgaccgtatctacacctatcaacgacttgagcgagtatgccaaaaaacaaggtatcacctacgcgcaactccgggatgcgaatccctggctgcgcgaaacgtctctaaagaacagaagcggaaagagttatgtcctccatatccccacacaagagggaatgcattatgatcccaaaaagactgttgcttacaataagcattgggtgattgattaatgatataaattaatatacggaatgataaagaaactaattaaggatattataaaaggagaagggggcttcaacaaaggagaggacatctccccagaaagcgaaggcatcccccaaaaggcgagagtatctccaattcccctccttcggggaaggaggggtggctgaaagccggggtggtaggtggatacacaatgctgataataactgacttgcgcattcacctaccacctccccctacggggactcctccttcccgaaggaggagaatcaggatagcaccgacttctagaagtgagttccttaatttattatttaccattatacatctatgaaactgaatacatatatgaaactgaaagaaagaatccgcgatttcctgcatgacgagaagttgaaacgaaaactatacgtcatcatcttcgaatcggacacccctgcggggaagttgttcgacgtggttcttatcggttgtatcctggtcagtgtattgctcgttatcatcgaaagcctgaaaagcatcccctcctacctgacgactccgtttgtcattatggaatatcttttcaccgctttcttcactttcgaatacctgacacgcatttactgttcgccccgcccacggaaatacatattcagtttcttcggcattgtagacctgctggctaccctcccgctctatatcggcctgcttttccccggcgcacgttacctgctcatcatccgcgctttccgtctgatacgcgtattccgtgtattcaagctgttcaacttcctgaacgaaggcgaacggctactcaccgccctgcgcgaaagcagcaagaagatagccgtctttttcctgttcgtcgtcattctggtgacttcgatcggaacgttgatgtacatgatagagggcacgcagcccgattcccagttcaacaacatcccgaacagtatctactgggcaatcgtcaccatgaccaccgtaggctatggcgacatcaccccggtcaccggattcggaaagttcctttccgcctgcgtgatgcttatcggctatacgatcatcgccgtaccgacaggaatcgtttcggcctccatgatgaaagactataaacgcagaagggacaaggaatgcccccactgccaccgctccggacacgaggacaatgccgggttttgcaaatactgcggcagcagtctgaatccgaaagacgaaatgcaagtaaaacccgaagacgaagccaaagacaacacatagctcaaaacagaaatgaaaaacaatctttaccccctatatttatgaataaacatcttaaaatcgcagcagctctattagtagctctaccgacattaaccttcgcgcaagtgcgtacggaacagacctttgaaaaaggctggaagtttacacgagaagacagcaaggacttcagtcagcagacgtacgacgacaccaaatggcaatccgtcaccgtcccgcacgactgggctatctacggtcctttcagtatcgaaaatgacaaacagaaagtcgctatcacccaggacgggcagaaggaagcactggaacacgcaggacgcacgggcggacttccctttgtcggtgtaggctggtatcgcctgaactttgaagccccggcattttcttccggcaagaaagcaaccctcatcttcgacggcgccatgagccacgcccgtgtctacatcaacggacaggaagccggcttctggccttacggctacaattcgttccacatcgacgccactccttatttaaaagcgggcgaacagaacaccttggccgtccgtctggaaaacgaaaccgaatcttcacgctggtatccgggcgcaggcctgtaccgcaacgttcatctggtgattaacgaagacgcccatatcccgacatgggggacgcagctcaccacgcctgtcgtaaagaaggatttcgccagagtcaacctgaaaacacgtctcgacatcccttcgggcaaggcgttcaccgactatcgcatcgtgaccgaactgaaagctcccgacggcaaagtggtagcttccgacgaacaacagggtacgaaatacgacgaaaaaatattcaaccaacatttcgtggtagacaaccctgcactctggtcgcccgattctccggcgctctattctgcagtgtccaaagtgtatgaaggcaatacgctgaaagacgaatataccacgcctttcggtatccgttctatcgaaatcatcccgaacaagggattctatctgaacggtgaacgtaccgcatttaaaggtgtgtgcaatcatcacgacctcggcccgttgggcggcattgccaacgaagcagggatccgccgccagatacgcatcctgaaagatatgggttgtaacgctatccgcacttcccacaatatgccggctcccgaactgatccgtgcgtgcgacgaaatgggtatgatgattatgtccgaatcgttcgacgaatggaaagcagccaaattgcagaacggttatcataagatatttgacaaatgggcggaaaaagacttggtgaacctgattcaccagttccgcaacaatcccagtgtcgtgatgtggtgcatcggcaacgaggttcccgaccagtggaacggtgaccgcggaccgaagttgtcccgcttcctgcaagacatctgtcaccgcgaagatcccacccgccccgtcactcaaggcatggatgctccggacgcagtggtgaataataatatggctgccgtaatggatgtagccggattcaattaccgtccgcacaagtaccggacgaattacaagaagctcccgcaacagattatcctggggagtgagacagcttccacagtcagttcgcgcggcgtgtacaagttgcctgtcgcccgacgttcgatgcagaagtatcccgatcatcaggcttcgtcatacgacgtagagcattgcggttggtctaacctgcccgaagacgactttatccagcacgaagacctcccctactgcatcggggaatttgtatggaccggcttcgattatctgggtgaaccgacaccgtactacaccgactggcccagccactcgtccctattcggtatcatcgaccttgccggactgcccaaagaccgctattacctctaccgcagtcactggaacaaggacgtggaaactctccacatcctcccgcactggaactgggaaggacacgaaggcgaagtagtcccggtatttgtctacacgaactacccgtctgccgagctgtttatcaacggtaagagccagggcaaacgtaccaaggatctctccgtaacgattgacaacagtgccgactctgcttcaacagcaaatctcaaacgtcagcaacgttaccgcctgatgtggatgaatacgaaatatgaaccggggactgtcaaagtggtcgcttacgacaaagacggcaagcccgttgccgaaaaggaaatgcataccgcaggaaaaccgcatcatatcgaactgatagcggaccgctcgcaaatcaaagccgacggaaaagacttgtcattcgtcaccgtcagagtagtggacaaggacggtaatctctgtccgctggcggataacactatcagcttcaaagtgaaaggcgcaggaacttaccgcgcaggagccaacggaaacccggcttcactcgaatcgttccagaccccgaagatgaaggtattcagcggaatgatgaccgcaatcgtttcttcttcggacaagccgggaaagatcacactggaagctaccggaaaaggattggcgaagggtgtgttgaatattgaaagcaaatagaaaataaaacaaatatgagaggctgactaacaagtcgacagtatctaaaactctcctccttcaggaaggaggagtacccgtagggggaggtggtaggtgaatgcgtaagtccattattatcagcattgtgtatccgcctaccaccccggctttcagccacccctccttccccgaaggaggggaatggaagatactaccgacttgttaaacagtctcttatttctttataaaagacctgttattataaactcttttgacaaatacgctcgaacaagaaaatcagaacgcaacccaccgcatagcaggcaatgtctttccaatcgaacgtagatccgagaataatttttgccgcccggttcgtaatccctaaggtttccaccaactgaaagtattgcatcacttctataaagcaggcaaaaagaaatacatagaacggcattctcggaatccctgttggcagaaatatacggacaaaactatacacaagcacaaccaccagtacatctccaatgtaaggacggacaaaattatcacgtacgtacaaagctatcaatacctctatacaaaatattaccagaaagctgataatgtaaaatatccttttcttcatccttctcttactcacagggttaaaaatccgttttgatctgcaaaggtacaactttttgtttctccgtcaaatacttccagtaccggacaggcatatcctgcttgtgctttctcggattcatacgttccttgatgcagatagccttgaagtacgttttccaaagttgctggaaaagtttttcatccttatccataaggctctcgtccagcattcccgttatcaggtgagcttcgcggctgtcgtcatcgaaggaaatcagcgtcacctcctgcaaatcataataaaaaccgtagcggcgtttcatatcataaataatccacttctgattggcaaagcggtctttgaaatgctgcaccgtaagcggcagagcattatactgcggttcgaaagccgcgaaaaacgtgccgtccgccgccttctgaaaacggacaaactgcattatatgcacacgctcaccgtccaccttcttccaaatctgtgcaagccggaggacgtccggatcggcaaaattcgtttcgatagagcgcggcgcatcaatcgccttgcggatataacggaaaataagaataccgacctccggaagctccgacagccaactctgcgtgagacagccaagcgcggaagacgaaaccttattctgcaatccccgccacacacgcgccgccttctcctcgtcagtgactacggtgtgcagatcgtcacagaataacggcaaagcgtctccttccgacagcagcgcatcgggaaaagtcttgcggaagtaagcgtcgaaaacagccgtcagcagaccgtcgaaggttttatcgtagaggtagacattcattcgcaaagttcaattcattcgccaaaatcaagtaacagttgccgttcatccaccttctttttcggcttcggcagcaacagactgcgtacccgttgcggcgaaagctcgttcacggtcgccatttggagaggcagttccttgcacgtaatgaaatactgtgccttcttcatcaccactccgatcttcttcaattcataaaatcccagtcgcgagaaacggcgggaagcgacaatcagcttcgccgatttcacaccgatgccgggcacacggaggagcatttcgtaatccgccttgttgatatcgaccgggaactgctccggatgacgcaacgcccacgagagtttcggatctatttcgaggtcgagatcgggatacgcatcatccactatctcatctactttaaactgatagaaacgcagcagccagtccgcctggtagagacggttttcacgcacgagaggcggctgcttcaatgccggaagacgcttgtcatacgtatttacggagacgtatccggaatagtagacacgcttcatcgtcgggcgcccgtagagtgccgacgagaggaaaagaatatccttatccgattcggaggtcgctcctacgatcatctgcgtgctctgtcccgcaggcgcaaagcgcggggcatggcggaacttctgccgttcctccttactttccaatactccctgctggatgtatttcatcggggcgaaaacacttttatgatccttctccggtgcaagcagtttcaggttttcttctttggggatttctacgttgacgctgagacggtcggcgtaaagtccggcttcgtttaccagttcgcgactggcaccgggaatgcttttcaggtggatatacccgttgaagcggtgcaccaggcgcaagtctttggcgacacgcacgagccgttccatggtatagtccggattgcggacaacgccggaactgaggaacaggccttcgatataattgcgacggtaaaattccatagtcagttctaccagttccgagacggaaaacgtggcgcgcgggaggtcgttgctgcggcggttcacgcagtaggcacaatcgtagatgcaataattggtaagcatgattttcagcaatgagatgcatcgcccgtcctcggcaaaactgtggcatatcccccagcctcccaccgtgttgcccagcattcccggtttattggaacgcactgtgccactggaagaacaggaaacatcatacttggcagactccgccagtatcttcaatttagctaagacattttcgttcatgacccccttttttcggttcttctgattacttctccgattctttcgcaaatatacaatttaatttgagaaaccggcagaaaaaaaagtttagcaaatatataagtacaaaataagtcaaaaattaagaggcgggaagctatgcttcaaaaagaaaaataataaatatataaattattacattatatattatacaaagcaaaatatatttataattttatcacaacaattattttttaactacctttgcagggattcaaagagaatcacaccaactaattaaatattaatttttacaaacatgaaaaaagtcaaagagattgacgatgaggacgaatggagtattaaaggtttcaaatctttctccatagcagcagtagaatactttccggagtacaccagcactgacgctgcaatcaaaagaatgcgccatgacatagagaacgacgcgcaattgctcgcggacttaaagcctacgcactacacccacaagaccgcacgcctcagccccaaacaacagtgcatacttttcaccacctggggacctcccgagattaagctgcacggtcatgacgaaacaccggaaaaccagaagtaggcaaaacacggaaaaaatgagttgagcgaactatataatatagaataatatatatttttatttatatatgcacggttcgtggcacgccccgtttttcagcacccgtgcaaaacgctcatatacaaacggttatcatcacaaagagggcggcacggttggtggcacggtcacagtcccgaaaacagagcctctattttccctaaacaaaggctctatttcccctaaacagagcctctgtttcaccgaaatgaaggctctgtttcactgaaacgaaggttctgccttgaccgggcagaatcctcgtttttctctccttccctatcaacaccgacaatttattaccggctctttccgtccaaatactacaccgccgtccatatccgccaacagcgtccaacgctattttgccgacgggaaatatcgccttatatttacaccgcattcaacaacgagtgtaaaacaataaaccatttcaattcatgaaacaattaactacatcatctctcaaacaaggttacatcactatcccccgggcattactaaacagacaagcaaccgacggcgctgccggagagacagaagcatttctccaaatcctggcacacaccaattattccgacgtgccatacgacatcaacgggacaatcattctatgcaaacgcggtgactcccttatcagctatcaccactggagcaatattttcggctggacacgccccaaaaccacccgtttctttcaacgactggccaaaggaggcattatagacctcatccctcatcaggaaaagatactccatatccgtatcaccaactttgatctttggaccggacgtatcccttcggaagccaaagacacccgaaaggaagaaatctccacagacttcgaccttttctgggacaaataccacaccgtgatgcggaagccgaaagtcaacgtcgcccgcggccgccgcgaatggaacaagctcacccgcgaggaacaacaactggcaatagaccgcatcgaggacgtctactaccacaccaacgacacccgcttcatcgcccacgcttccacttacctgaaagacaaggcttttctgaacgaatatatggactaaaaagacaaagaatatgcaaccacacgcacccgaactcgaagaagccgtcataggcgcctgcctgatagagcaggaagcgctgccgctcatagcggacaagttacgcccggaaatgttctacgacgaccaccaccaactgatcttcgctgccctcatggcgatgtatcatgccggcaagaagatcgacatactgaccgtcaaggaagaactcgcccgtcgcggaaatctggatgcgataggcggaccgtatgccattgtgcaactgagcagcaaagtcgcctcctccgcacatatcgaatatcacgcgcaaatcattcaccagaaatacctggcacgcgaaatggttgtcggcttcaacaagctgctcacctgtgccatggacgagacgatcgacatcgacgacactctcatagacgcccacaacctcctcgaccgtctcgaaggtgaatccggccacaacgcccacatccgcgacatggaaacccttatggcggacacaatggaagaagccgaaaggcgcatcgccaagagcgtgaacggcgtcaccggcattcccaccggtctgacggaactggacaagaaaacaggtggcttacaggacaatgacctcatcgttatcgccgcccgtccctcggtaggcaaaacggccttcgccctccacttggcacgccatgcggctctggcggggaacgcagtagccgtgtacagtctcgaaatgcagggcgaacgccttggggaccgttggctaatggccgcctgcaacatcaacccgtaccggtggcgcaacgggattcccaatccccaagaggtagcggaggcacgcaccaccgcctcgggactggcacaactgcctatctacgtggacgacagttcttccgtcagcatggatcacatccgttcgagtgcacggctgctgaaaagccgcaagcagtgtgacatgattatcatcgactacctgcaactttgcgacatgagcaccaagcaggtcaaccggaaccgggaacaggaggtggcacaagccacccgcaaagcgaagttgctggcaaaggagttgcatatccccgtcgtactgctgagccagttgaaccgcgaatcggagaaccgtcccggaggtcgtccggaactggcgcacctgcgcgaaagcggagcaatcgaacaggatgcggacatcgttatactcctttaccgaccggctatgctgcatattccgaccgaccgcgaaagcggttacccgacagagggactgggtgtggctatcgttgccaagcaacgtaacggggagacgggaaatgtgtatttcggacataatcagtctattacaaaattttatgactatgttcctccaatggaatatttgaataaatacgccaaatagttttggttatttatataaataatataacagtaaataatagattatcaactattatatctgccaaattattttataaatatagagaaaataaacggttgattacttgacttcgcctcttggattttgtatatttgtagtatcagaaagagattatagaattatttatctaaaccttaactttttaattttatggatgtattagtagaacgctatcagcgtaggaagtatgtgaatcaggaggatgctccgatgttgtattacattcgccagaaagccggcaatgtaagagtcatggatgtcgatacaatggcttccgccattgaaagcaagtcgtcgcttacggcaggggatgtgaagcataccattgaagcatttgtggagcagttgcggttgtcgcttactcagggcgataaagtgaaaatcgacgggttgggaacgtttcatatcaccttgaccagtgacggtacggaggtgaagaaggattgcacggtacgtagtatccgccgtgtcaatgtccgtttcgttgccgataaggcgctgaagttaatcaattcgagccacacgagcacgcagagcgataataatgtggtgttcgcattgggtggtaaaggcgacggcagcgatccggacgagggtggttcgggtagcggctccggaggttcgggtgaggagaaaccgggcggaggcggagtgacaccggacccgtcagtataaaacccgaaaaacagtcccgcatggcttcaggagccgacttctacggttccacgccatgcggtttctgttttcaatcttcaactttcaatattcaatttttaattaaataagatgttagacaaaatcattgatattatcatgaccgtccttccttttttcggaggtcgcaagaagcgtcaacagatgatgcaggaagtcaaagaattcagcgaattagtgaaagagcagtacaatttcctcatgcagcagcttgagaaggtattgaaggattatttcaacctgagcgaccgtgtgaaggagatgcattccgaaatcttttcgctgaaaggtaagttgtcggaagctattgccctgcaatgcgtcaataaagagtgtatccaacgaaataacggcaacgcatgagagctatcagtctgatcgttgtccactgttccgccactcgtgaggacaagagtttcaccgagcacgacctggacgtttgccaccgtcgtcgtggtttcaacggtgtggggtatcatttttatattcgcaagaatggggacatcaaatcgacccgtcctctcgaacgcatcggtgcgcacgcccgtggcttcaacagtgaaagtatcggtatctgctatgagggcggtctggacagcgagggacatcccaaagacacccggacaccgtggcagaaacattctttgcgtgtgcttatcctgacgttattgagggattatcccggatgtcgtgtctgcggacatcgtgacctgagtcccgacctcaacggcaacggtgagattgaaccggaggaatggatcaaggcttgtccttgcttcgacgccgaaaagtgttggagcgaagagtaagtattgaaaagcccggactttcgcaagcatcctgcatagcttctcctccttcgggaaggaggagtccccgtagggggaggtggtaggaaaaataatgagtttacctttttaaaagaaataaggaatataccttatctctacctaccaccccgccctttgggcacccctccttcccaaaaggaggggaagcctgcggtataattccctgcggtataattctcagcagtataattctcagcagtataatccatgcggaatgcagcacttacgaaacttgaattattaattcaaagatatctcccgctccgacaagtccataatgggaataagcgaatgacgagagatatcaatgaagtttgtcgatatcccggtttctaaatatttaattatttagttgaacctgccggatatgtaatagtcaattctgtttcagcattctccggtgctccccaacctgtagtagctatcactttaattttcactgtaataggattaacgattgcaccttcttgtgctctgatatatcacaggaataggattatcggaagttgagtctatgctatttaaaacctcggcagtggtttcttcatgagccatgcggtggagatcataatgatgcttcttcaataattcgaccaaataggtaggcgtacccgtttcaaaccagtaactgccaaactcctgatacttgaatgcattaagcaaactaaacggattgtaaatgccgatagagttatatgtaaaatgataaccgtcgtaatagtcacgcagtttcttgcatatttcatcatacgttactccctgggcatccgccaattcatgcaattcactttcaagattatcatgaagctcctgttcgctgataccgcaaaggtccacatatatctgacgcatagatatatcgtcaagattgttcaagtcactgaatacactaactttgccaaatttcgtaacacctgtcaacatagcaaacttaatataaccgtccattgacttcaacacaccatagaaagccttcaacgtattccaatactcttcttgcaactcatctcttccaatagcctgcaacatgggcttatcatactcgtcaacgagaatcacaacacgctgtcccgttttctccgccgccaaacgaataagggtgaccaaacggtcgtctatcgtctcatctttagaacatgagccatactgagactcatataccagcaactgacggtcgacaagacgaatcagatcatctaccgtatcgaatttctttgcattcagatccagatgaataacgggatattttatccaatccttctccagcttttccattgccagcccctcaaaaagttcttttttcccagaaaaataagcctcaagcgtggatattaacagactcttaccgaaacgacgcgggcggctcaggaagtgatacacctttctacctaaataatggtaactatccatgcaaaaacaattaaaagattggttgccaaaaatagaaaaagggcatacccgaatggatataccctctccttgttttctaatatcttagcagacttctaatattattttttagaagcttccaaagatgctttacggaattctttcattgctttttcaatgtccagagaagccttacgagcgcgagttcctgctgccttgttaccgttttcaatctgagcgttagcatcttttgagaagtcagcataaagagctgctaccttttctaccaattctttcataatccttttattttttcgttaataatgtgccgcaaaaatacactgtttcccgaaataaacgcataaaaacaatattttttttgaaataatctttgaaaaatacctaaaaaaaaggcttttcatcatttttacctacctttgtagccatgaaactgcttacagataccgattatatacatgcattgattgctgaaggagagcatcagcaacaggatttcaaatttgaaatttccgacgcacgcaaaatagccaaaacattatcggcctttgcaaacaccgacggaggacgattgcttatcggcgtgaaggacaacggaaaaatagcaggcgtacgctccgaagaagagaaatatatgattgaagctgccgcacaactttactgtatccccgaagtggaatataccatgcagacatatatagtggaaggccggcaagtattagtagttaccattgaggaaacaccccacaaaccggtatacgccaaagacgaaaacggaaagcctctcgcctacctccgcatcaaagatgaaaatatactggcaactcctatccacctccgtgtatggcaacaaagcgacagtccacggggagaactgatccgttataccgaacgggaacaactcttgctcgaccaactggaacaaggtaacttactctcactcaaccgctactgccgccgaacgggactttcccgccgggccgccgaacatctgttggccaaatttgtccgttatgatattgtggaacctgtattcgaaaatcataagttttacttccgaattaagaacgaatagccacaaaaaataccggatatttggacggttccgccaacagtgtacaactcgcccaacaaaaaagagataatgccggacatcgaaaaggacttggaatgttggtgaaacccaactgtttttgtacctttgcacacaaattgccatgtgggagtcaggggacacactttccactcattcaaatagtaatttgtaaataatataatcattaatataacaatgggcttatttggtttattcaagaaaaaatccgatgaaacaaaagtcggcaatgtagaagatttcatatcactgacccgggtttatttccagtcagttatcgccacaaaccttggtatcaccaatatccgctttttgccggacgtggctaacttcaaacgtctgtttaaagtgcctacacaaaacggtaaactgggactgggtgagaagtccgcctcacgcaaaatgctgatgcaggactacggactgaacgataatttcttcaaagaaatcgatgcatccgtaaaacgtaattgccgcacacagaatgatatccaatcttacttatttatgtatcaggggttctcgaatgacctgatgatgttaatgggtaacttgatgcagtggaaattccgtatgccgtctatcttcaaaaaggcactgtatggaatgacgcagaaaacggttcatgacgtatgtaccaaaacggtatggaaggctgacgacgtgcacaagacggctatggctgtccgtcagtacaaagaacgtctcggatactccgaacaatggatgacggattatgtttacaatatcgttcttctcgccaagaaagaaccgaaacggaagaacgacgacacagagacgaaaaaatagtctgtccgaaatgttagaaagaaaaaaagattcgtaaagaattgaacgatagaaaaagcggaggttttgttcctccgctttttttgttatctttataggctctatgaaaattgacgcatcatccttatttatgaacctacaaaaagaaatagatcgcttatgaaacaaaagaaattgcttacacttactttttcacagttgaaacaaatctttaatcaagagctaccggaactagtggagatagcggaaaaaagtactactgttgaggactttaaggctgaattactgactttttcggaaacttgtgatataaagagtgatactgcgaaggaggcgagggagcaaattcgactcttactccattatgatggacagcatgtccatgaactgtctacgggacaggatatgtcagtacagactattcgactgctctacaagtttctgacggaaacgctggaaaatatggaaatgccgacggatttgtttattgaattgtttcagctgttcaaaaggctgaaagaagaaacggttcctctaccttcacctcaacgtatcaagagccgaaatgaccgctgggaaaccggactggacgaagaggtgagagagattcgcgatgaaaacaaggagagaatgttacatttactgattcagaagattgaaaacaggaagtcgaaaccttcagttcgttttcattttgaggagggaatgagttatgaggagaaataccggttggtgagcgaatggtggaatgattttcgttttcacttggcaatggcggtaaaaagtccgggagagctgaaccgttttctgggaaactcgctttcttcggaaacaatgtatctactctaccgtgcccgtaaaaaagggatgcctttttttgccactccttattatttatcattacttaatgtgacgggatacgggtataatgacgaggcaatccgaagttatattctttattcaccacgattggtagaaacgtatggaaatattcgtgcatgggaaaaggaagatattgtagaggcgggaaaaccgaatgctgcggggtggattttaccggacggacataatattcatcgacgctatccggaggtggcaattcttattcccgatacaatgggacgggcttgcggcgggctttgtgcttcttgccaacgtatgtatgacttccaaagcgaacggctaaatttcgaatttgagactttacgcccgaaggaatcatgggaccgcaaattgcgccggttgatgacttactttgaagaggatacacaattacgggatattctcataacgggtggtgatgcattgatgagccagaataagacactacgacatatactggaagcagtgtatcgaatggcagtccgcaagcagagagcaaatcttgaaaggcccgaaggagagaagtatgcagaactgcaacgggtacggttgggatcacggttattggcttatctgccaatgcgtattaatgatgaactggttgaaattctacgcgaatttaaagaaaaggcttcagcaattggtgtcaagcagtttattattcagacccattttcaaacaccgctagaggtgacccccgaagcgaaagaggcaatccggaaaatcctttctgcggggtggatcattacgaaccagttagtgtatacggtggctgcttcgcgccggggacatacgacacgactccgacaggtacttaattcattgggagttgtatgttactatactttctctgtaaaaggattcaatgaaaattatgcagtattcgcaccgaacagtcgttcaatgcaagaacaacaggaagaaaagatatatggtcaaatgactccggaacaagcggaagaactgtacaggatactggaaacgaaagtaggtgcggatattgaaacacaagaggatgttgccaagcaactaagacgtttcatgagaaaacatcgcctgcccttccttgctaccgatcgcagtgtgctgaatctgccggctatcggtaaaagtatgacttttcagttagtaggacttacggaagaaggaaaacgtatcctatgtttcgaacacgacggtacacggcatcatagtccgattatcaatcaaatgggacaaatttatatcgtagagaataagtcattggctgcttatctacgccaattaggaaaaatgggggaagacccggaagattatgcttcaatatggagctatacgaaaggggaaaccgaacctcgcttcagtctttacgagtatcctgatttccccttccggacgacggaaaagatgagtaatttaagtattacgccaagttagttctcttttacgcgtattacgacattcgcaataattgcagtaaggcctccggtggtgatccctgaagaaaatatgcttcgtatcgcttccggagcctgtttcaagacatccggcattaattctacacccagtcctaaggagaggctgactgccaataccaatgtctctttacgccctatttcctgggacgaaataatacggattcctgcagctgctacggtaccgaacatcagtaaggttgcaccacccaatacgggatcgggcattaaagagaatacggctcctacaatggggaataatcccaacaagacaagcattgcggcaatgtaataccccacatagcggctggccactccggtcagttggataataccattattttgggcaaagattgagttcggaaaggaattgaagactccggcaagaaaggaattgaacccgtctgccatgacaccaccggaaacacgttttagatatgaatcaccctcgatcggaagaccggaaatcatggagttggcagtcacgtcgcctgttgcttcaatggcagttatcaaataaactaaaccaatggcaataaaagacgaaacattgaattcaacaccatatttaaaaggttgagggatattaaagctcatcagcatttcaacattcagcgaactcatatctacttttcccaaagcaaaagccaatccataacccaaacaaagaccgagcacgatagagctcatgcgcaggtatttgtttctgcaacgattgaaaaacaatacgctcaataataccaatgctgcgatagacaggttttcccacgaaccgaaagtaccgttatccattgccgaatatccgccgctacaagatacgatgccgacctttatcaggctcaatccgataagcagtacgacaatgccggacaccaacggagtgatgatgttgcgaagatatttgaatgtacggctgacaatcatttcaatcggagcggcagccatacaggaaccgaaaatcaacggtaatccacctactaatcccgtggctatgataggaccgataaaggaaaaacttgttccctgaatacagagcagtcccgcccccaccggaccgaaacgacggcattgtacgaaagtggaaactcccgaagcgaacaaggacatggaaacaagaaagcccgtcttttctacatccagtttcaaggcacttgctatgataagaggaggtgttattatggctacaaaaatggccagtaaatgttgcaaggctgcaaacaaggcttccttaaaaggaggacggtcttctacaccgtaaattaaatctgttttcatccaataattgatgtattcaataaattaattcaatgtccatttcagggctagagtcggaattacatagaatccgtcacgaccaccgaagttattacttacttccacttcggaacctacacttagattaaagtgtttgtttattcctttgatgcggttcagatttacccaaaattgcggttcggtaaggaagatcgtttttccgtaatcggtttcctcacgccaccagtcggcaaatccggagaaagtaagcagattattgcagaagttgacataccatgttccggtcaactggaaattgttaggtgatttatgcttctggatatatttgtacatggctgtcaaagagaagcctttggaaaaagaagcattgttataggtataagtagctcctgccaagtaagcgtttttgtaagagaatccttttgccagtccaccattatattcaagatgtgccgagaaaggtcctttccagaattttacttcacgggctatctcccaataggcggaggcaacaccctcagaggtatagtccatatcgacaaagaaataagtacttccccacgtgtcgggatgaaacttctcgacagtagacgttaacaaaggacgttctttcaaatctttgtcatacaaagaacggccaaagtcgtaatgtaactgtatgttttgtgcccgcagttccggtataaaagaaagcaatacacacagaaaaatagtagagatgattgttttcatgacgaatgtgtttaaatgaaggtgcaaaattagttaaatcggcacacatatacacattcttacaacagatttttagtccaagccattactttctacatcccaccaaagtcgtgtacctccgtcatcaggatctcccaaggtttctacaagagcaagatactggtcgggatcttccgtttgcaatgtgccggggaagttgagacggcgtaccataatttccgtatcaatacatccgttttggctatggttataacgcaccgggaacaaacggggatagcccgtacgacgctgttctgcccatgcttcacaaccttcgggaaacatggcaatccacttctgcgtgataatcctttccagttttatctctttatcagcttcggaatcccactttggtgatactttacaacgggcttcgatattgttgccgttatcatacgtatcttcaaaatcgaaagccattcgttcgctgttcagataatcttccacctgataaattccattttgatgaaaggaagttattactccgtttcgatagcagctttcttcatcttcgtccgtccacccacgcaaagcagcttcggcacgcaggaaccaaatttccgatgaagtcatcaaaggagcgtccgttgtttgcgttacggtcagttttgacaatccggcataatgagaatgcgaaaagcacgtcccctgacggataccgcgatatgtgtttttaaactgttcgtcggtacaaggtgcgaaatagacagcaatacgcgggtcgtcatatccagtcagaatcgattccatggaagcactcatataagtctcgttccaaacaaggttgagttctcccaacgggttagtatacccggacttggtggagacagccacccgttccgtttcggcctcaaagacaccgtattcattgttaagcccttcctgaaattcaacacatgccttatccggctcgacagcagaaattctcatcgccagccgcatacgcaaggaattggcaaacttaatccacgaagaatatctgccgtccagcagaatatcgaaacgggagaatccattagattccggatttgcttccacataactggtaagagcgacaacggcagaatcaagttcgttaaaaaactcataataaacttccttctgcgtatcaggacggtaatgcttccctgcatctgcaaaattcttgtagataataggtccgtaataatccgtcacacggtgcatcgcttccactttcagaattttcgtaataccgaataaagcaggatgtgtatcacgggttgcattctctgactggtaaatctgagggaaaatatacgaatacatgtgtgtccacatcgcactgttccaaccgtcctgcatattataatcggaattatgagaacctccgttcaatggtttggcatcgtgcatatatccgctgaacatatctgcgttcaagttctgtgtcaattggaaaggccagttcttgcctttgccataatcatagttaaagtaaataccctgctgaataatccctaaacggattccgtaaccattgtcgtcaattatcagatcttcatctgtaatgccggtctggtcggtattaaactcacggaattttccggtacatgcaaccgaaagcaacagtaaccccaataagtatatatgaatatagttctttttcatcatctcctcccgtatctttagaattcacatttcacagtaaagcccaggcttcgtgttgtcggcataccaaacacttcaattccctgattatcatttccggtagaaagtactaaatccgggtcaaaaggagctttcttatacaggaaacaaagattacgcgcaacgaaagcaagctgcaaatctttcagcactttcgttttctgcatccattttttcggaaaagtatagttcagtgagacttcccgcaaacgaagatttgtagcatcatacatataatattccgtcactccggcacgtccgcccactatattcttataaaaacctttcacattgtctatctgctgtccttcaagaattacatatcctctgtcacgagccagcgctgtcacttgggacaccccgtagagatccatttccgcctgtgtctgcgaaagtatcttgccgccataacgccaatccaacaagaagtagagactgaagcctttgtaagagaatgtatggttccaccccattataaaacgtggattggcattgcccacctttattgtattcccttcaccttcaacagccggaaggcctttatggtcgccctcggtctgatagacaatattcccttcggcatcacgcacgaaagccttcccataaatatctccgatagaaccacctttcaccaacttcatcgcataactggatgagaaactgctcggtccataaactaactctttcagttcttcatgcagttctttgatcttatttctattggacgagaaattcaaagatgttttccatgtaaaatccggagtaagtaccggagtggcatctacggtcagttcccaaccacggttttgtatatctccggcatttacatacctgtatgcatacatatctccggcaagggcgggaagtttgaaaaactgattatgagtattggtgcggtaataagtcagattgaagcctaagcgactttggaagaacctccattccgtacccacctctaccgaatgggtcatttccggttccatttccttaaaaggagcagcgtcattcgcctggagctctcccccagcagtaatatgtgaaacggagtttgtgataaactgaggaatatcattacctaccttactgtatgttccccgtagtttggcaaaagaaatccattcgggaagttgtatccatttgtctataagaaaagaaagaccggcagaaggataaaagaatccggatttctcatggcttgtatatgccaaagtcgatgcccagtcattacgggctgttaaatcaaggaataccttatcctgatagccaacttgtgccgtaccaaatacggactgtaactggcgtcgggaatctatcttctggtcaatgctggcggaaccgttcattacgatattagccaaattaaacacattggcatacttcaaagaagcattcttggaatcgtaacgggtggaattgacatttttatcattgatactcccaccaatggccacatccaacgcaaaatcctcccatttcctcttccccatagccatgacatcaccgtaaatcaacgtttcctgataatccatttcaatataacgcccgtttgccccacataaagcgggagcagtagaagcataaaatttctggcgcatcttatcggatatataatcaacactaccacgagcctggacagtcagccaactatttatcctcaaattcgctgagagagagatgatgctacgcatacgtgtctccttactttgtatacggttctgtatccaataaggattctgctcaaaatcttctgtaaaagtatgccaattttgtatccccagtttccgttccggatcgtatatttcataattatccttataataagacaaatcttccccacggggaaaacgataaaggccgaccagaggattcatgtaaaaacctcccgatacaggtttgttctttacaatctgtcgcatcacgttcacattaccgtccaatttcagacgttgattgaacattacagctgtttcccgcaggttgatgttatgctttgtcagttggttcttgtctacaataccacgtccggtagtattggcataagagaaataagtctgtatcttttcatttccataattgacggatacggaagtaatggaagttaatccggtacgaaaaaaatcattcagttcattggaggtaggcagatacgttttttctccccaactatctacaacatcactcaccccatagcagttctgcattttaggaagactgaatgctttgtcaaatgtcaatccggtggagaaatgaatattcctctgtccggcagtattacctttcttggtagtaatcagaataaccccattcgcagcctgacttccatacaaagctgctgccggagcacctttcaagatactgatactttccacatcctccggattcaaattggagataccgtcacctccgtcccggtttccggcatttgcagtaccaccgattgcagaataagcttgttcagtaccgatattcaacatcggcacgccgtctatgacataaagaggctgattatcaccggatgcggaacgaatcccccgaagactcactttcgcagaacctcctataccggaggaatttttatttatctgcactcccgcagccttgccggcaagagctgttatcatattaacctctttcatacgggtgagttcctcccctttcactttctgaatggaatatgctaaagaagcctcttttttttcaagaccaagagcagttataatcacattgtcaagcatcactgtattttcacgaagctgtatctcaagtgtctttctaccccctacactgacttctatgctctcgtaccccacaaaagaaacttgcaagaccgcactatccggcacagataagatgaaatttccttcaatgtctgtcacagttccacgggttccccctttctctcgtatcgttgcaccaataaggggttcaccactgacatcaacaacacgtccccttactgttgaattatcagcagaggcttttctcaccgtttccctaaacaccggtcgctttgaagcgtaacagttctctccaagaaaaaagaataatcctataagacaataacttataaaaattctttttttcaatgatattctaataaatcgtgtattcattatgccacaaaaataactaaatattttaaatatagtaattttttatcttgattttgagagaaatgaacaatatcattatttttgtaggaaattaaaatgatacataaaaatggaaatcgaaaaacatccgttagaaccgtttcttcctgcgaaagcaaagctgctcatgctcggcagttttccgccacaaaaaaaacgttggtcaatggatttttattatccgaacctcaataatgatatgtggcgcatcttcgggattttattcttcgatgacaaggattattttctgaatgagacacggaaagcattttgccgcgaacgaattattgattttctgaatgaaaagggaattgctttgttcgataccgcttcatctattcgccgattacaagataatgcatcggataaatttctcgaagtagtggaagctactgacgtgacagcactgctccggcaacttcccgaatgtaaagctattgtcactacgggacagaaagccacagatactctccgccaacaattcaacatagaggaacccaaagtcggcgattactcggaatttattttcgaaggtcgcgccatgcggctctaccgaatgccttcctcatcacgggcatacccattggcattagacaagaaagcgactgcttaccggattatgtatcaggatttgcaaattctttcttaaatatatatatgtaatagtaatcattaaacaataaattgcgtatgaaacctctgtttttacaatacccggcatgtagtacttgccaaaaagccaagaagtggttaacagaaaataacattgaatacaccaatcgacttatcgtagaagaaaatcctacaatagaagaattaagagcatggattccgcgtagcggtctgcctatcaagaaattcttcaacactagcggtttggtttataaagaactgaaactgagcgaaaagctcccaaacatgagcgaggaggaacagatcgcattgcttgctacaaacggaaaattagtaaaacgaccactagtagtaacagacagctttgtattggtcggtttcaagcccgatgagtgggaaaaattaaaatagttcaaaacttatttaccctaacgcttgcagattcggaagtttctactacctttgcagccgcaaacacgggagtagctcagttggtagagcaccggtctccaaaaccgggtgtcgggagttcgagcctctcctcccgtgcaaagagataaaaccgcaaatagttgatgagactgtttgcggttttatctcttatattaaagtacatcatcagtgtcccattaaaattgggacgtttcaaaaattaaataaatctgttccaatagatagaccttaatcaatcagagctgtccgaagtacttattataacagacagttctttcttattcttctctgatttcgtaaattatctcaataaataattgtttttttggaatagatttgtacttttaggacttgaataagtgcaagttatttccttattttacttacgaaatccaaataaacacatatatatcttatgaaatatctattcctaacgattttctttctcgcatcatttgcagttatcgcctgtgggcaaattgtatttccttcccccaatcaagtggaaatgcaaaaaggctacctgactttaagaaaaaagatttccatatacgctgaagataccacaactttttatttaagtcttttccgtacagaagtacttcataacgcttctgtcaaatggacgaagaaagcatctaaagccgaaatccgctggatgaccgattcttcacttcctcccgaaggttatcggataaatatcagtccgcgacaaatggtgatagccgcctctgataaaagaggattcactcatgcagtacaaaccttgcggcaatgggttactggttcaacaggaattctcaccttcgcctgtgctgatatttccgattctccccgtacgccatggcgttgttttctgctagattccggacgtcaataccagaaaatatccactatcaagaaatatattgatatggtttcattacttaaaatgaattatttccattggcatttgaccgaaggactaggttggcgaatcgaaatcaaacaatatccgcgtcttgcacagataggaggctcggtaggaaaaggagaagaacaacaaggattttatacacagaaagagatacaggaaattatcgaatatgccagcgaacgaaacataaccgtcgttcctgaaattgacatgccggggcatgccgaagcagcactttccgcttatccggaactcggttgtttcggtcaacctgttgaagtaccacagcacggatttactcaaaatatattttgtgcaggaaaagaagaagtcctgcatttcctgaaaaatatattggatgaggtatgcgctattttcccttcaccctatatacatttgggaggagacgaagccccgaaaggcaattgggacaaatgtccggattgccaaaaaagaattgcagcaatgaatctgaaagatagccatgatctgcaattatggttttcggcacaaatggcggattatctgaagtcgaaaggacgaaaggccatattctggggggatgtagtttatcatgacggatatccgttaccggacaacatagtaattcaatggtggaactaccgtgggcacaaagagctagcacttcggaatgcaattaaacaccattatccagtcatttgcagttccaattattatacgtatctgaacttcccggtcactccttggagaggatataccaatacacgtaccttcgacctgaaagacatatatcagaacaatccttccgacaaggcgatcaaccaaaaggaccctttaattcttggcatgacttgtgctttgtggactgacgacggagttacagaacgaatgatagaccggcgtctgtttccccgtatcttggcattggcagaacaaatgtggtatcagggagagagacttgactttacccggttccaccaaaacatccttcaacgaaaagaatggttcgaacaaatgggattcgaattcggaccggccttaaaaagtgaagtaaagaaagggtatcaatgggattaaaagaaatagaaacacccaatgccatgattagttactttgccgaacaactcggtccactgatagagaaaagcgaaataaaacaacccacctatttatattgggaattgatgagaaaggcgggaagcggaaatctataaagaaaagagttcggcaagatatcgccaaagttatttcgttggtgtatcctcccgaactcttactagccaataacaatatcaatgattacttaattatatgtctgtcaccattcaaacagagaacttacttatactaacaggatatatttatttctcttgctgtattcccttaacagcctcaaccaaacggacaaattctctcctgtatcctttatcatcatgatccaatccctgtttagccagactgattactttgtcataagtagcctcacccttgaaatcagaatcccggagtaactgcccgaacatagctacggcagacgcaaaacggaaatcggaagatacattgttacctttattatccacaaaaggaagttctattttcctgctgacatctttatctggagccttatagcggagtttcactgtcagaagttcgtcagaaccggtaggcttcacactcactttttctttcttctgatatttcaattcatccacctttcctgcatacgtattctttcctcctaccggaatcacttcatagaaagccgtcaccgtgtgccctgcgcccatatctccggcgtcttttgcatcattattgaaatcttcatctttcagcaaacgactttcataacctaccagacgatacgcttgtacttgtgccggattaaattcaacctgtaacttaacatctttcgccaccgtatgaagcgtagcgccaaactcaccgaccagcacacggttggcttcctgcaaattatctatataagcatggttaccatttcccttttcggcaagtacctgaatctttttatctttgtagttacccattccataccccagtacagtcaggaacactccacttttccgttctctctcgattagctgttccagtccttctgccgaagaaacacctacattgaagtcaccgtcagaacaaaggataatacggttattaccattagagataaaattcttcttcgctattttataagccagcataatacctgcgccaccggcagttgaacctcccgccgtcagttcatctatcgcttcacgaatcttctgcttgtcactgcccgaagtcgattcaagttttacaccggcacttcctgaataggtaacaatggctactttatccttatcacgcaagttattgaccaacaatttaagagaagacttcaccaaatccaaccgattggctccccacatagaaccggacacgtcaatcagaaataccagattggaggcaggcaagttatccgtaggaatctcctttgctttcagtccgatacggacaagacggttagcaggattccaaggacaggctccggcttccattgtaatcttcacagggtcgtttccggtcggtttcggatagtcataagaaaagtaattgaccagttcttccgtacggacagcatctaccggaggcaactcacctttattgacaaaccgacgcatattactgtaagaagctgcatctacatcaatggagaaagtagaaagcgctgcatccgccacctctttgaagccattttcctgaaaggaaccatattcttccgtattcacacacatatcatacgcaggtgtaggacatatcgccatattagcgcttgttatagccttagtcttccgggttccgtagccaaccaccacgcattcttccaacgcaacctcatcagctttcatcctgatatccagtctggcagatttgacgactctgctttcttgtttgtatccgataaactgaaacaacaacgtctcccctttcttcgcttgaatagcatattgtccatttacatttgtcaccgtacctttggtagtacctttcagcattacagaacaaccgacaatcggagtcccgtccgcaacatccgtcaccgtacccgtcacagtcagcgtctgcgcgttcaccacacctaaagaaacaactgccatgagcagtacgagcatcattgctctgaattgatttgctttcataactttatcgttttaaaatgttactattaattcgcttttgatatagagatgcagatttcacacagattccataaaccgattgaagttttttttatttttcttccgacagttgctatatttagtcccaatccctatctttggcaacaaaaacagttttgtttttcaaaagaaacatatcaaaactatcggacgaggaattactgacacattatacaaagtccggtgatacggaatatttcggtgagctatacaaccgttatatcccgttactgtatggactttgcctgaaatatctgcaagatgaagaccgtgcacaggaagcggtgatgcaattgtttgaagatttattgccgaaaacgggcaactacgagataaaagtcttcaagccgtggctctaccgggtagccaagaatcattgtctgcaacttctgcgaaaagaaaacaaagaaattccgttagattatacgatcaacgttatggaatccgacgaatttctgcatctattaagtgaagaggaaagtccggaggaacaactgaaggcattgcatcactgtcttgaaaagttgcccgaagaacaacggaccagcattacacgtttctttttagaagaaatgtcgtatgccgatatcgtcgaacagaccggatttactctgaacaatgtgaaaagctatatccaaaacggaaagcgaaacttaaaaaattgtatcaagaaacaggccctatgaaactattagactacatacgaggactccgcaaaggaaaagaggcacatcgactggagaaagagtcgatgaaagacccttttctggccgatgctatggacggatatggtcaagtggagggaaatcatgaacaacgaatcgggcaactgcggatgcaggtctcggctcgtgccacaaagaaaaggaatctttcaaagaaacagaattcgtatgctgtcacttggagcattgccgcctgcctggtaatcggtatcggtatcagctcttatttcctgttccttaaaaagaggatgacggatgatgtattcatcgctaaagaagagattccttcagcggtatttgaacctattagtccgaaagaagaaatttcttctttagcagaaactaagataaagcaggattccactcacgaagtcactgcgacgccaacggataagaaagatatagtagccaagagcaaatctattccaaagactcaaagtgcaccagtagcaataacgccggttattgaggaaaccgtcgggcggacagatatacaagaggaaagaatagtagcggatacggatacttcactttccgaagttcatcaattgaaggcagccaaagcagccacccccaatttgaacctgataaaaggtaaagtgacggatgaaaaaggagaacctatcatcggagccagtgtagcatataccggtacgaatattggtacagtaacagacctcaacggtgagttcatattgaaaaaagaaaaaggcaacaagcaactgacagcacagttcatcggttacgaaccggtggagattcccgtagataccagccggacaatgctgatagccatgaatgaagaccaacaagcacttagtgaagtagtggtagtggggtatggcaaaaagaagaagtccaacgtcgccggtgctacggcaaaaataaatttaaaggcaaaagaaaaatacaagacgccacaaccggtgataggtaagcgcaaatacaagaaatatctggaagaaaatctgattcgtccgaatgacgagtcatgtaaggatgtgaaaggagaagtagtcctctctttctttgtagataaagaaggaaggccacagaatatcactgtcgttcacgggttatgcgaatctgccgacaaagaagcaatccgtcttgtcaaagaaggtccgaagtggacgcccggcgaccttccgacaagagttacggtagagttttgatttctcttgcattcatctgatttctcttatattaattcgtagctggccatttgtatcggcatatccaggttatggagcactttctccagcaggataccttcccgattgtcatattcatagccgaaagtggcacggattccttgcaggataaactgtgtggcacggtctagagccattggaaggctgtcgccctgcatcaacgaaccggtaatcacgctggtgaaagtatctcccgtgccgggataatgggcgggaagatacggacaggttactttccagtaacgatttccctgacggttgtacgcataaaccgaggttttgtgaggctcatcgtgcacaggaacacttgtgatgataacgacttgcggacctttgtcggacaggagacgaagatattctttcagttcttcgtctgtattgtccgctttataaggtttatccagcaaatagaacagctcagtcatattgggtgtaaccacatccgccttctttatcaagtgacgcatttccttcaccatttccatatcaaaattggtatatagtctgccgttatctcccagtacagggtcggctacgatcaggctgtcctcatggcggaagtcattgataaaatcggaaacaatctgaatctgtttcggagaacccagataaccggtgtaaatagcgtcgaactgcacattcagctttttccattgggcgataatcttgggcatttcatccgtcaggtccagaaaggagaagtcgggatattgcgtatgattggacaataccgccgtcggcaaggggcaaacttgaaaacccatagacgacagaatggggataacgactgtgagagaaacacgccccataccggaaaggtcatgaacggcagctattttctttactttatttgcatacatatttgttacaattagacaattattattcttatcgatgcgaaagaagagcggaatccttgttttcactctctccaaacagaggctctatttagggaaaacgaaggctctgtttacactaaatagaggctctgtttttagaaagaacagaacctctgtttttttaatggaagttctgtttgttcttgtcctaacaaaattacgcttccatggctcaatctggtttaaagttctgattcctctcctttcggaaaagagggagggctgaaggccggggtggcaggcaggcagttacacaatgttgataatatgcggttcatgtattcacctaccacctccccctacgggtactcctccttccagaaggaggagaattgtagatactatcgacttaaggcgggctcattgtttttaaatcaaatagattctggaataaatgaaccggagctatgtcaaaatcaccaatacttcccgtgccccatgtgctcccataaccaacgcctgttcgatgtccgccgtctttgacggaccggagatgaacgtaccgaatttataatcctgcccgtccagttcacgataagcatcatacattgtatttactattttattacggtcaatcagaatcaccaaccgttcggagataaaatagagcgctttatatttcacttcctgcggaatccagatagcaccgttctccgctacacctatctctcctttaatcactgccacatctgttccgtccaactctttcggatcgtccagattatccggattaaacgttgcacaagaaatatccggcaagacggaggcaatacgcatcgcatccggatagttcctgcggatcactgcatttacatcttctccttctcccaacacgacagccgtaccgcccaccgcacggctaacggcacagaactgttctatcttatcgggataagccaaccgtttcatagctgcaatgtccggcttctcgtaacgagttccggtattctgacgaatacgggctaatatttcttccttactgctcattttgtttcctcctttccctgtactttatttttcttccacatttcgttgaatgactcttttgcaaattcgggtagttcacgtccctttccccaatcatcgagatcattgtacttcataaagcggggcagaccgtttatcaccggagccgcccacaaagccgcattaaacagtgcgggacgttccattaagaacttcatgccaccggacatgattttctttccggtgttcgcctttcccagtccgtccaaatcctgacgccatttataaatctgttccgccaaatctactttcacgggacagacatcggagcaggatatgcacaaagagcaggcggaaagattatcgtaatacttctccgggtcatgtgccataccgagattgattccgataggcccgggaataaagtaggtgtaagagtatcccccactccggcgatataccggacaggtattcatgcatgcaccgcaacggatgcagttcaatgtcttgatgtggtccggcttggaaagtatggtactgcggccgttatccacgatgataatatggtattcaccgccttcgcggggacgacggtaatgagaagtataggtggtcaccggctgtccggtagccgaacgggcaagcagtcgggtaaatacccccaaagcgtccaaatccggcacaatcttttccataccgaaggcagcgatattcagtttcgggaaagaagtccccatatcggcatttccttcattggtacagaccacgatatcaccggtagaggccacggcaaagttcgcgcccgtcatggctgcttccgcattcaggaaaaggtggcgcaggttcttgcgggcagcgtgcgtcaggtaagtcgggtcgaagtttcctttctccgtacccatttccttttcaaaaagttcgcccacttgctcgcgtttgatatgaatggcgggcaggacgatgtggctcggttcaagatgcatcagttgaaggatacgttcgcccaaatcggattccacgacgtcaatgccgcgctccattaaaaaggggttcagtccgcattcttcggcaagcatagacttgctcttgataaaatgacgcacattatgttcgttcagaatctcgtagacaatggcacaatattcatcggcatctttcgcccaatgaacgattgctccgttggcagtggcattcttctcaaattccagtaaaagttcttcgaggtggctgttggaatatagtttcaactcacaagccttgttgcgcagttcctcccattcgggaacttccttgctcatcttatcccttttggcacggaccagccaaagagtttcattatgccatgctgccattttgctgtcctgcaagaatttctcggcagcctttgaatgtctggtactcatgattgcgacgctaagatttctactatatggataattctaatcggcagatgttcccgttcgatgacgccttgcatgtgcatcaggcaggaactgtccgccccgacaatgtattcggctccggtagccatatggtctttcaccttgtcacgtcccatgcagacggataccgcctgttcttctaccgcaaacattcccccgaagccgcagcactcgtcaatatggctcggttcaaagacttcgataccttccacaagatttagcaaatcacgcaacttattgtaataagggatattcaactcgctcggagcggaattaaacaattcgcgcacgccgtgacaactgttgtgtatgctgaccttatgcggaaagcgtgcaggcagtttcgacggttttatcacatcgtgaataaaatcacagaggtcataaatctttcccgcactttggcaaacgtgcccttctttcttcaaaataccgggatgattctctttcacaaaagccacacaactggccgagggaccgacgatataatcgtactcccggaacaggtcgtcaaaacggagcgccaacttagccgattcaccttcaaaaccggcatttgccattggctgtccgcaacaggtctgatccaacggataatcgacgtctactcccaaacttttcaatagtctatacgatgccacccctacattgggataaatagcattgatataacaaggaataaacaaacctactttcataatatattatgtaaaaattataagcatcctctgctacatccgcctatgtgtctagcggatatcaattagtttgtgcgtttgcaggctgagtctccatttgggatgtcgcatgacgcaatccaccgtatcagcagtattaatacaagaacaaggctggaggaaaaaatgttcggcgggaagtagttcaaaaatactgatatcttgtccttcgtagactactttcacttcatcgatccggttgatcttcagctccacgccttgtttgggcgagcaagtcacccagtcgacagattcgggcaaggggttcgtaccgttggtttctacggtcacgtatttaccggcttcatgcaagcggtcgatcaaggtgtcgtctatccaaagggaaggttcgcctcccgtaaggacaacggttacggcaggatatttcttaacttcggcgatgatttcatcatcggtcatcattgttccttcttcatgctgtgtgtcgcaaaagctacatttcaggttacatccggagaaacggatgaaaacagcaggagtcccggtataatatccctccccctgcaaactgtaaaagatttcattaatctttctcatcgttcactaatttgttttgtccgctatggtttattcttccttatcttccgaatggtcttttacatcattcgaggcattgtcttttacagtgtccttctcgtaaatgacaatattgccttccgactcctgtacctctactttatagcattgcgggatctgtttgcacacccagcgggcaatattctctgcggtgggattgaacgggagtacttcattcaggttctggtggtcgagtttttccatgaccacttctttaatacgggtgaaatctaccaccataccgtctgcattgagtcgtgccgaacggcagtagacagtgataatccagttgtgaccgtgtagactggcgcatttgctgcgatacgggagcaccagcttatgagaagccgatatctccaaacgtttgattactgtaaacattgttatacgtctttttttaggttatacgcatctaatgtcacctcgatgcaatgacaaaggtaatataaaaagagtttccattcagcaaatccgatgtttttttcctgtttttacactatctttgctgcatgaaaactctctgtatcattttaggaagcatctccctggcactcggcattctcggtatctttctgccgttgttgcccacgactccttttctgttactcacagccgccctttatttcaagggttcgccacgattatataactggttactgaatcaccggcacttcggtccttatatccgtaacttccgcgagaataaagcaattccgctccgagccaaagttatctcacttgtgctgatgtggggaacaatgctatattgcatcttcttcctcattcctctgctatgggtaaaaattctcttggggttgattgccgcaggggtcacttatcatattctctctttcaagacattaagatagttggaaagtccctgacgggcatctgccagtttatcttcccaatgttttacggagttctgcccaataatatcggttacatattttacggagataaacggaatttccttggcacggcagacaaatgcctgtgcataggcttccatatctactacgtctccgctgacgtgagtcagttctgtcaggaagctatcccccgtattacaagttccattctccgtccagtgcctgcaataacctttcgcttcgagcaaagctgcagaatcgatttcgcattcgattcccagacctgccagcttctgcatatcacggtctacaaacttccggcagacaaaaatatccccaacctgatgattgacagtccccgcacttccgatatttaaaaccaagtcgggttgcacctgacgaatagcctcagccagatgaaaggctgattttactttaccaatacctgtgcggatgtaataaggttctacatcaggccactttatttccacaaattcgccttggacggcgtaggttactaatatcttcaacataatacgtttccaaaaatagattactattactgtttcttatgtcactagaaactttgcaaagatataaatattttttcttctgatgtgttggtcacttcaatatcacaatcattcatctcaaaacagattccgccaaaatgacccatacctatatttattaataaagaaggaaaatgacaattcaatacagtacaaaatctgctcaaaataccattaacaatagataccgaatatactattttgaactaaaaagaacattttatcccgaaaagtttttgtaatatcagagttaatcgtatttttgtgtacaattttggtgtagtgatgacagaagaagaaaaaaagttattgaaaacctttgaaacgcaactacggcatttgatatatatccacgatgaattaaagcgtgaaaatgccgaattgaagaagcttcttgatatggaaaagctaaaaaatgagaaggtacaggctcaatacgatgaattggaagtcagctatacgaacctaaagacagctacggcaatcacccttaacggcagcgacgtaaaagagacgaagttgcgattgtcaaaattagtgcgtgaagtcgataaatgcatcgctttgttgaatgaataaagaaggagatgtatgaacgataagataaaaataaacctgcaaatagcagactcaaactacccgttaaccatcaaccgagaggaagaacaaacggtacgggaagccgccaagcaggtaaatatcaggcttaataagtaccgggaagtatacaaaaatctggaaccggaaaaaattattgccatggtagcctatcagttctcgttagagaaactgcaattaatgcaacgtaacgataccagcccctatgtggagaaggtaaaagaactaactgaattgctggaagattattttaaagaggaataagaacgaccggccattcgctgataagagagaaacaaccacgcactgcacaatatccaagcaaagccctgcttggatatttggcggtgcatttttatttatatacttaaattaaatgtagaatgatagcaataatagcaacagcaattgcttgcttcatcgtaggaggattactttcatacatactattccggtatgcactgaaatccaaatacgacaacgtcctgaaagaagcggagacggaagctgaagtaattaagaaaaacaagctgctggaagtgaaggagaaattcctgaacaaaaaggcggatttggaaaaggaagtggcactgcgtaatcagaagatccagcaggcggaaaacaaattgaaacagcgtgaaatggtactcagccagcgtcaggaggaaatccagcgcaagaaaatggaagccgaggctgtaaaagaaaacctggaagcgcagcttgttattgttgacaagaagaaagaggaactggacaaactgcaacagcaggaaatcgagaaactggaaacaatctccggactgtctgccgaagaagcaaaagaacgtctggtagaatcactgaaagaagaagctaaaacgcaggctcaatcattcatcaacgatattatggatgatgccaaactgactgccagcaaagaagcaaaacgtatcgttatccagtctatccaacgggtagctacggaaactgcaatagaaaactccgtaacggtattccatatcgaatcggatgaaatcaaaggacgtatcatcggacgtgaaggacgtaatatccgtgctttggaagcagccaccggtgtggaaatcgttgttgatgatactccggaagcaatcgttctttccgcattcgacccggttcgacgtgaaattgcccgtctggcactgcatcagcttgtgaccgacggacgtatccaccccgcacgcatcgaagaagtagtggctaaagtacgtaaacaagtagaagaagaaatcatagaaaccggtaaacgtacaacgatcgaccttggtatccatggtctgcatcctgaactgatccgtattatcggtaaaatgaaatatcgttcttcatatggacagaacctgttgcaacatgcacgtgagacagccaatctctgcgctgtaatggcatcggaactgggtctgaacccgaagaaggcgaaacgtgccggattgttgcatgatataggtaaagtgcctgatgaagaaccggaattgccacacgcattgctgggtatgaaactcgcagagaaatacaaagagaaaccggacatctgcaacgctatcggtgctcaccacgatgagacggaaatgacgagtctgttggctcctatcgtacaggtttgtgatgctatatccggtgcacgtccgggagcacgccgcgaaattgtagaggcttatatcaagcgtctgaatgatctcgaacaattggcgatgtcttatccgggtgtaaccaagacttatgcaatccaggcaggacgcgaactccgcgttatcgttggtgcggataagattgacgacaagcagacagaaagcctgtccggcgaaatcgctaagaaaatccaggatgagatgacttatccgggacaagtgaagattaccgtaattcgtgaaacacgtgcggttagcttcgctaaataaaaatcagaatacaaaaaggattcaatagatgaagagggcgaagcaattcgccctcttttaatatacactgtaattaatacttagcagattattcatttttaccccgtaaacatcaatctatgaataagtttcaattcgaagtttgtgccaattcagtagaaagctgtctggcagcacaaaaaggcggagccaaccgggtagaactatgcgcaggcattccggaaggcggaacaactccttcttatggagaaatctccgtagcacgtgaggttctcgatgcaactcgtttgcacgtcattatccgtccccggggcggtgacttcctctactctcctatcgaagtaaaggcaatgctgaaagatatagaaatggccaaacagctgaaagctgacggggtcgtatttggttgtttaactgccgaaggagaaattgatcttactatcatgcaagagttaatgaaggcagcacaaggattgtccgttactttccacagggcttttgacgtttgtcgtgatccgaagaaagcactggaacaaatcattgcacttggctgcaatcgtattctcacttccggtcaacaaccaactgccgaatcaggcatccctttgctcaaagaattacaagagcaagcggcaggaaggattatcctacttgcaggatgcggcgtcaatgaaaagaatattcatcgaatcgcctcggaaacagggatacgggaatttcatttctctgcacgtgaaaacatcaaaagcggaatgaattataaaaatgaatcagtatccatgggcggcactgtacatatcgacgaatacgaacgaaacgtaactaccgcccggagagttatggatacgattcaagctacaaataaggaatgaccgtgatataaatacctgtgataatagccgaagtaatcactccggaaatattagcgcccaaagcatcgcccagaacaaatgagtccggattatccttgctcacgatcttctgggcaactttagccgtagtgggaacacagctaacagctgcaataccaatcaccggattataattgccgcgtttgatgaaatacatgatataaccaccgataatccctccgatgccggaaagcaacagtgctacaatacccagaactagtaacttcaagattttaggatcaagcaacaggtgagcgtcgcaaagtacacccaacaaaagtcctaacataaaggtagaaccataaagtaacggaccactaacaaaatcatatatatgtttcatgcccgattcgcgaacggcaacccccagaaacaaagagaagaacaaaggagaagcaaccggaaacaagaaacagagaacagcacaaagaacagccgagaaagccagcttcactttagcgtcataattcttcggagcctttttcgttaccattttaatggcacggaaccgttttggtactaacaatttcaccagataaggataccccccatacgtcaaccccaaatacagataggcaactacggtaatgggaacaaacaaatgctttgccaatgccagcgaagtaaacaataccattggaccgtcagcacctcctaccatagcaacagaagcactttcttttaaagtcagtccgagagcagcagcgataggcaccgtcaggaaggtacccagttcggcacacaaagcaaggaatatactagcaaagggtttctgaagcaggaagcctacatccagcagggttccgatccccataaagacaaaacaggctatcagtccgttactgaatgtaagggtgtagacaggttgtagaaagtctatctgcatcgtattcatcagtgcatccgtgtccgaaagcatcggatcgagaaaaaggttgcctaatgtgccgtcgggcataatcagtgtcccgcagttgatagctaccattcccaaccccattgggatcataaccataggttcaagcactcctttccagcctagatagataagcagtaaaccgagaagtaccagaaagattctggcagaagcgaggaaccaaccgctcgccatcattgtgccaatgccttgaaataaggtcgcgaaatctatattttccataaataagtgtctttttattgtttgttagcagtaggtttctttgagtttttcttgttgatatgtgcccgttcttcttccttgagaaagaattcacgggtatcccgcggataataatagtccagcagagtttcatccgaagctccgtgacttacaccatgataataaccggcgtaaccggtaaagttacggttgataccacggctgaagtcttcacgataatcccccaatgcttcttctgcttcaagcggtatctgtctgacaagtttctccactttctgacgatgctgccgccagcgatgaaggcggattagctccagcttgtgggaactataaaagtcaaacgaatcggcagcataagcaatcagtttgataactgccgcgacaaagaagcctatgagaaaggttaaccccatcatagccaatgtggataataataaatgaatcatagtaatataaaaactagttgtacaatcatttatgcacaaacaagacacgtccggaaaatgaatataatccgaacctgctaaacatatttgcacaaattctcaggaatacttatggcaaagaagggctaaatcaagatatgggctaaggtatagatataatacctattggaatactttaaatagtcagtatctgaatatataattttccttttatcttcggatagacggaaagttctagaactcaacaactgtacaatcgtaggtatatcattaaatttcagtgtacggacaggagatatgtttcttggaagagaaaaagcagtcaatatgccgaaatcataatgttccgcaggtgccgaagaaaatccggtaggcgagacgtcacaaagaaccgggactccggtttcttcccgaaatccctgcaagtcttcttcattggagaacaaacctactccaacaagtaaaaatgcaagtgacagtatgcacaatagatacttcataataactctcctacaaacgtaacaattaattcgcacaaaagtgcgcccgatagagagaattaacgaatattgcattctgtcacactacattactaccttcctatcctacatttttctacaacccgtgaatggttttcatcagttgttctcccagtccgatagtatatccttgagatacaaagaccacccggttgaacgtatcggcaataataaacataggaagaatatccgaattagaaagattcatcgacttagcaatctgattttggatacgattgtctatatctaccccataagcaatagtagaaggtagtccctgaaactccgcaggatgaaacttcttgtattgttcctcggaggggaaaagaagaacaatctttctaccccatttctcaaactcactgcccaaagcagcaatgtctctcaaagcatggttggtaggttcctgccctactcccaacacaccgacaacaaaatatccccttccacaagtttgtagaatactttgtgatgttgattgtatttcttcatctcctaacggacgatagagcgattccgaatcaaaatttccaatcacctgtacctgttctttgctttctctcatcaccaattcaatatcggtagtcgcttccggtttcacattaaagaaagtgatattggaaagcactgcaccacttgccatacggcttccggtgactaacatataatacccggaatccagttttgctccattctttagaagattcgcccacgtagcaccttttcccatatctacatccccctcatcataattcaacagttggaataccccgtctttgaacttggaaagcgtaaaatgagaataatacttcggatcgggcaatgaggcaataggtttataagcagcacgcaatatgccggtagtggcctgtacaggagaacttgtagagaaattcacatcaaaagtatgtccctccttatcagtatactgcactttccctgtcaccttatctatccgagcaggtatacctaaagtacgtgccattgccacaaagaagatatcacgcgacttttcatctgctacacgcgctttccacactcctatcggcgacataggtatacgctgcgaattcaactcattattgatttggatttccttcttacaccattctaccaaccgtatcggttcttttataaactcccctgcttcttcctttgaaatgactttcttgaaaaaagaacggtaaggtgtcaacatttcattctctacacgtggattggcaatctccgcacatgcccataagtccgtttcctgaggatcaggagcattcttcaaatgatcttccaatacttccaaagaaacatccctccagtcctttgcagaaagttgttgtaataagggcaaagcaagtccttctctatcacattcggttgccgacttccggaaatcaagtaacgtctgatagtttccccgcgaagcgaccaacattttcacaaactgttccgtatcggcaataccttcttgttgaaacgaagccaacgcagtttttgcacgttcttccgtcagcatcgtggcaacatacgcattacgaatagaatcctccttagccaaacgaagatcattttcggcacgctgttccggagttacttcaggcaaattggctccttcaaccggaggagtgatatccaaatccaatgtatatgcttctcctcctttcttatctaaaaccaaattcaaagtatcttctttaccaaaagacaacttagaaaagccgaatgccccgtcagcggaagcccataccaacatatctcctttaccggctgtcaacgatgcccggccgtcggtaccagtgtatttggtagctaccgtataaaactcggcataattgtacaccttaaaatcaactttggctccggaaacaggtttcccattcgcatctgtcaccgtcaccacggcttttgccgtcggagcataattccctattacattgatttcagtatagttaggagtttcgagcataatctcctccggaccgttataacgtccgaataccttggtatgcatcagcattccacgacttgcaggcgcattaaaccaacccagattcaagaccggttccggttcgcaagccccgaagaaataccattcaccgtctgcccaagcctctacccacgcatggttatcatcggtatgtgcccaacggggagtataaacctgacgcgcaggaatcccaacggaacgcaatgcggcaacagtaaaagtggattcttccccacaacgcccgtatgccgtctttactgaagccaaaggcgaactagtgcgggcgtcactcggacgatacaccaccttctcatgacaccagtggttcacttccagaattgcatctttcatcgaaaggcctttcaccctctctttcaattctccataaaacacttttcgcgaatcatccagattctcattattcacccggataggcagaacaaaatgccggaataattcatcggtgacgttttttccccaagacatttcgttacgggcctgctcggaaagacgaagattctccagatagtaatttccggaataatccgtaatatcccctatcggcatataggcatacaaaaacatcagagcttcacgctcggaaagagtcaaagtcgaatcggaaaagattgcgaacaaatctccatgaggaagtgccctctgcttctgttcaaaatcctgaaacacctgattccggtaagcctcctccttcagaaagtgagattcaccacaggaaaacaatacaaccgatagaatcggaacaagtaatagtcgaatgtgtgtgtttatattcatatcttaataaaataaatatgtgagctattttatgcgtacttaaaagatacgttcacaaaattacaagtttttttcagaaagacggcacaagtccttgtaaatgtatgtaataggtttgtaatatataccgtgttcgaacctcttataaaaagaaaaagcagaagaaaaagaaatattttatgttttacagcatataattcaaaaacatttcgtatctttgcagtgttaataaagaaaacaagatgtaaaaccgctcttcaaaacgtggagggcaaaaaaagaggaaacaaattatgaaaaagaatgcaaatgaaaagattatgatgttacagtaccgtattaaacgctatcaagcaatgggaaatggtgcaatgtgccaaaccctgaacggtaaacttcaaaaactgctgtcacagcaggttgccatgtaaataaacacactaattatattgaaataaagcgaggaactttcgagtatcctcgctttttttatacttttgtactctaaagataataaaacacatcaattatgaagaaactattaatatcggtcgcggtattcgcctttgccatagcctcatttgcacaagcacccggctatgaattcacaaccgttgtatcccacaaagccacacctgtcaaagatcagtcgtccaccggaacttgctggtgctttgccactgcatcttttatggagtcggaactgctccgcatggggaaaggagaatacgatttatcagagatgttcatcgtccgccaaaagtacatgaaccaaatggaagataattatctccgacgcggaaaaggaaatatcggcgagggaagcctggcacatacttttaaaaacgcttataagcaagtaggaattgtaccggaagaggcatactccggtttgatagacggcaacaaagaacataaccatggagcgttatcacgttatttcaaggctttggtagacgcaaatatcgcttctaaaaagcgtactccgcaatattatgcacttatcaataatctgttcgatacgtatttgggtaagctgccggagaaattcacttataaaggaaaggaatatacaccgcagtctttcaccgaaagcctgggactgaatatggatgattacatagaactgaccagcttcacccacaaaccttattatgaaatgttctctcccgaggtaccggacaactgggagaaccagccgatgtataatcttccgttggatgaactgattgaaactatcgactatgcactgaacaaaggatataccgtatgttgggacggtgatgtcagcgaacaaggcttctcttttaagaacggagttgctatcaatccacaagtggaagacgtaaaagattactctactaccgatcgcgcccgttttgaaagtatgccgaaatatcaacgcctggacgaagtgtttaagtttgagcacccttatccggaaatcgccgtaacacctgaaatccgtcaggaaggctatgaaaagtttgtaactaccgacgaccatttaatgcatatcaccggcattgcaaaagatcagaacggtactaaatattatattaccaagaactcctggggagcagaaagtaacaagtccggcggttacctgaatatgtcggaaagctatgtacgtgccaagactatctgcgttatggtacacaaagactccctaccgaaggaattgaaacagaaactcggaatccgataaaacgtatcgggcaaattcttatagacttagttggaaaaaacagggcggaaaagtagtattacttcaccgccctattttcttattaacccactattaaacccttttttcttttatttctttttcagcgtcacatcactgatttctaccacaccacctttacctagggaaaggatagctacataacaatctttcaggatagccgcatcatcatcagtatcggatacttccagattggcatttgatttcttactgctgatagcattcaccacctgtcccatatcatagtaaaccactactttagtccatttatcagcatccttaatcttgaagttatattgtgcacccgaagcgtttggttgagcgtccgcatcataatctctacgcatgaagaaagtagtgttgtacttaccgttatcattcttttcctcattcgtctgcttgatatatacacttaccggagtgccggcttccttagcttttgcatagaaagtgagaacatagatacccttttccagaccgtcggtaacacgctgtcccaagaatgccttgtaccaggaaatattcttttcggctccggagttgtcaatcttcatggcattcggatacttggcgtctcctgtctgttcccaagcaatggtagtcgctccgtcagcttcattattcatgataaaccattctcctgcggtagccttgttggcgttagttactttagttttcacttcggtagcaaacttttcgtttttaatcagattttgagcacttacgcttactcccgcgatagccaaaaggccggcaaataatactttcttcatcttatagcaatttaattgttaatatctcaatttctattctttcttattttacctgttgaatgacaaatttataattcccggtcattttcttttcttctgctttcagtgtgatccggtaaatctccttaccccatacattagacaggcgcggatcatctaacttgacagtttccagttcggctttaaattgagccggatagtccagttccaccttctgtcctctgacttcgatacgcactttgcccggcgacggaaatgtaacatttccccaagtcaggaagtttacctgattaggcgccagcacttcatttaatgtatagttgtcggccaccaccaacttacggtcatccagtttataagaacgaacccagctttttactttcgcttctgccggataggcagcagctatatcagtagagaaaaagcgattcttctcattacacaccgtattggtagccttatagtcctgaccgaatttctgcgatatcccgttaatcatcggcaagttatgataatcactctgcatcgtccaaatcttatagcggtcctttccaaatgtctgtttggtatatgtgcccacgccggcgtcaatcaatacgggaatcgtattcagatacaaagagaatgtgcccgcatcattatgattgtggctttcgttattgaaccctcctttggctgctacaaacattccatgtttattcttcatatagcagaattccgtttcgggataccaagtcacgtccagcatctcatgtttaggggtggctttggcaagatcattacagcaaagcagggactggagagaacggaaagcatcattacccattgtagcatacggctttctgccattcaatagataagcggcaaaatgcatcatctcctcactgttcacagccttaccgaaacgatagatcaataaaggatcacccccgccttgtgcagatgcatcggcaaagtttacgacccagccattgcctacataagagcgtgacatatattcacccattcggcgaatcatcggttcctgaaacaaggatattttgccacccgtaccgtcagaaagaatctgaagataatcataaagtttaccggctgcgtgtccccagtaggatgttccttcttcacaagccccgtcggatttcacaaagtttatgaacttatccaccgatttcatcgaacggtaaacggctttgaccagtttatccttgttgttctccattaataagaaacattgcagcgcattggagttacaccatggattccagttgttgataatctctcccggccgccagttgaaagccatccaccacatatcatcatcattcatataaggatcgagaatgcgttctttaatagctttacgtatttgaagagacaccacggggttaattttgtcgaacggtttacggaaaaaatagtgtacccatgccattaaagcaccataaccaccggaaccaagatcgataatctgttcgcggaaatcaggaagtgaacgtttactgctctggcgaggcaaatgtgcagacaaaacccatgaattcatctcgcagctcatgtaagctccgtttaataactggtcgataaaacgtccctttccttcggccagttcagcaagcatcaacgcattcaatgcctggcggttggcgtcataaggagcttccattactttacgattaccactacgttcgtattccagataagcagtggcaggaatcagtttccatttataatcgagaagtttctcaccggctgcgataagacgttgcttgttaggccccattaacgaatcccaggctgcccgatcggtataagccgggtaaggcacccaagcttgtttcattactaatacgtttttcaacgtagcttcatcagccgctttttgcagcatatttcgttcggtgtaagcattggctttgaaagaaagacttcccaaagttgcaaccagaagaaaacaaagtaaatgtttcattcgattcatggtattttgttcatttaagtatggcaaagatagcgcatctccctaaaaacgaggtgaacaaatcatacgaacctgatgacaaaatagtacagagttcaagaattgtactcacagagagcttaaattaagtattcaagtcataaaagcgatgattttatcctgcaaaaaacagaggctctatttgagtaaaacagaggctctgtttggggtaaatagaggctctgtttgagtgaaatagaggctctgttttattcccagtcactgaactcgaaactgagctgttcccagactccgtgttgctcatcggcttcttctttcggattggaaacggaaagtccgataaggcggatcggatgttgctcgtattccactgttttcaataattccttggcgagtggaagcacgcggtccagcgtcgtcaactcctgcgactgggtgatactgcgggtgatctgactaaaatcatggaacttgattttcagcgtcagagtgtttcccttgaactcttttcgttgcagtcgttctatcagttctaccgccatgtgatatagttcgataataacagatgaacgggaggaaatatcccgttccaatgtacgctcgcacccgatagatttacgaatacgaaccgcttccacaggacgttcgtcaatccctcgtgcacattcgtaataaagtgatcctactttgccaaaatgcgcggtcaatgtctccaatgaacatttccgcagttgaagcccgttacggattcccaacagatgcattctctttgccgtgacaggtcccactccccaaaaggattcaataggcagacgggcgatgaactcgagtgcctgttccggatgaatggtacacaacccgtccggtttacgataatccgaagctattttggcaagaaacttattataagaaatcccggcagatgcaacgagattcaactggtcgcgaatcttctgctttatttccttcgctatatccacagccaaagaaatacccttcttgttctccgtcacatccaggaaagcctcatccaaagaaagcggttcaatgatatcggtatattcatgaaagatttcatgtatctgtcgggaaacggacttatagacatccattcggcccggtacgaaaattaactgaggacaaaggcgctttgccttctgtgaggacatcgcagaacggacaccgtaacgccgggcttcatagctggcagcagctactactcctctttcttcggcatgaccgactgccagaggttttccccgaagctccggatgatcacgctgttctacggatgcgtagaaggcgtccatgtcaatgtgtatgatctttctctgaaccatttcttgcgattagcagagcaaacttactataaattcctgaataatttctgtttagcggttcaaaaaatattcaagattgcaccaaaccgactcttaataatactatatttgcatattatctattgaaaccacaggcgcacctgaaaagtttatatcacagtactatatacttcaatattatgaaaaaaatactattttgcgtattaataatgctttgcagcatttccgcatttgctcaaaaaagaattactttcaaaatagaaaagctttcaactcccgaaaacttcctttatttgcaatcttacgacgatatctacaaaagacttatcatgtccgaaaccgaagttttttcaaaagaagttgaaaagcaggaaaagaatccgccgttcaatatcatcgcaaaaagcgaagctcccgacagcctggtatcttatcgctaccattctttctttcaaggtatgtatcaggcttatgcggaccacagaccgtttgtgttatctccggacatgatctggttgttaatcagccaaggctttgcacgacatatcaacgctaatcaagaagcaatgcgagattatatcgtcgatttctccggaaaacaatcgttgattgttaagacagataaacagttggaagatcctactctttcatggaatgagatcttccctcaatttacagaacaaataaaaaaacaagtaggaaatagcctggttgaaaccctgacttgcaacttctcaacaacaacacctttagagaaaattgcctctgaaataacaatcatggaatccgtgaagccttattttgagtttattgttatacgcattgtttgcggaatcccggaaataaccctcgaaggtacacctgaagattgggagaaggtgctaagtaaggctaaaagtttgaaaggatataagctcgaatggtggatctccgagctggaacctcttctggaggaatttgtaaaagcatccaaaggcgaaattaataaaggcttttggcgcaatatgtttaaatatcattcgcaagagaagtatggcgctcctaatatgatcgacggctggatagtgaaattctttccttatgacaaaaaaggacaaaggaacaatctaaaacaactggaaggcacagacagtctgcctgatgaaatagtaaaagtagatttaaaatatcaggaagtatataacaatacagttacagaaactccgttggaactttgggcaggcttcgtcgggcttgaacagaataaaagaaacttcgctctacgaccacaaatcagttggatgatcagaaagaaagacctcactaacaacaaagtgaaaaacaaattaatggcagatacacaaggtacaggtttcggtcgtggcatttctattagagtgaaagaatttccttctgttttgttagaactcactgaaataaagaaattggaaataagattcattaatcagattgatataccggatgaaatatcaaagataaaaattgaacatttagagttattcgggaaaataagcaaagaaggaattgaacgtattaaaagactattgcctgatagtgatattaaaataaatggttcacgaatataagaaatagtcccgatgaacgggactatttcttatatatatcaggcctgtttcttagccagaaacttcttagtcagccactttcttacaggttcatcatacagcttcagacagaggtatgccaacaggatatttccgaagaatactatcaaagccaccggccatgtatcggagaaagtgagtttttccccactccacaaccaggcataatacaaatacataaaaggataatgaacgatgtacaagggataggatatatctcccaggaatttgcaaattccggaagtccctttatctgtcgtttttccggaggcacccaggtaaacaaggatcgggaaaagaataatggtacatacagagtcataaataccattcatccacgaagcttccataccaccgatatgtggtatagacagtagaacagcaatcgcaatactacatatccagaaagctcctctaatcttgaccggtttaaaaatacgcgacatcaacaaccctgcggaaaaagcaaacagcaaacgcagaaatcctccgagcagattataatccagcaatgaccaacctacacctaaatgcccataaccggaaagattgcatacagcaaatgaagccagtccgatcgccgccagaatgacaagcacggtcagctgtttggtcgagaaccggcggataaacagggcatacagaatattccctatatactcgaaaaacaaagaccaactcggaccgttcaaaggatacatttctccatttccacgaacttcggaacccgaaccgggtacagccggaatcaagaaaagattgagaagcaatgcaagcatcaccatagatatgctgacctgcgtaccgtcccacttctcacaaccttgtatacaaaacgtaatagcacctaaaacagctcccaggataaccattggatgtaaacggattaacctgcgtttgaaaaagtcttttgtgttcatcgttgttttccaacggtcgtcataagcgtaaccaacaacgaatcccgacaggataaaaaagaaatcgacggccaaatagccgtgattgaaccgctggtctatgggacttgtggcaaagccttcaaatatatgataccatataaccaaaagagcagcgattcctctcaagccgtcaaggagttcataatggggtttactatctgcaaatgcagcagaagaagagatgttttgcatgataaatttataaattagattattattttgcgtatcactgatgagggcccaaagttacagaagttagttattaaaaaaattgtcctacatcaaaatacgcccctaccagaaattatttccggcttctaaggcggctaagtgtcggaagggttattccaagataagaggcaatatatcctaattgtacccgctggcatatctgaggaaactgctgcataaattcctcatatcgctctttggccgacaaagtcaggcgatctttgtgtgaacggtgtaagcgtcggtattcattctgatgaatgatccttccccaattagccagttcgatattggtctgaaaaagccggatcaaatcagatagtgctattttataggcaaccacgtcttcaagcgtttccacaaattcctcactcattttattataatataattcatccatgctgaaaacaatccctccttcacacgagaaggaggtagtgatttcctctccgttgaccagccaataagagcgggtcattcctttttcgatgaaataagctgatctgctatattgattagcctttatcaattgatattttttagggaaatggcaaagtgtcacattatccttcaatagttgtattgtatcatcagaaaccggatacagagaggtcatcatttctattacattcgtcataaagcaaatccttaattgtttttccagtggtcacaaagataggaaaaacaattacttcagcaatacaaacggcaaccattttacaaaacgatattctctatcgagctttaaggcaatgacaggtatttgtcgtcctttctcccaagccggcaaggataagatgacctcattattctttcgttgaatcttaatccttttacctgttgacaaatcaaaagctttggttatctgatagccttccaaagaatttatccgaagggtagaaaccggtttccgtaaatgcaagtatatatactcatctttataggtacttcctatttcatcagtttgcttgaaaggacctccatgtgtatcatacacagcttctctattccggttgatccatttcgtcaattcatataaccgttccacttgttcttcgggcatctctccggtaggtttaggtccgatattcactaatagattaccgttaccgcaaagtgttttactaaacattccgatcagttcgtctgctgtcagcatcttagcatcaggttcgtaagcatataccggataagtgacgctggtacatgcttcccatggaaacgggggagcatctgttgttttggcttctattgagaagtagtcgcccgatgagccgtctgtccagaaagtttcatgcccgtcctctcctctggtaatagccagacgagtagataacgtattactttttagtttcttgatatactgatataaatcatttccttcttttgcagtccaaagaggatccagccaaaagccgtcaaaccacaagatatccggctggtaacggtctatcagttcttttgtctggttatgcacaaaccggataaaatcttcccgcccatatttcggttcttttatttctcttccaacttgtgccatagagttccaaccgcaataatcaatgtctgctattgaatagtaaatgccataaagcaatccctgtttccgacattcttcacccaattccttcaaaatatctcgcttgaaaggtatgcggtctatatcaaagatagaatattcgctcggccaaatgcaaaacccgtcatggtgttttgaaatgactaccatatatttacatccagcctgaacagctacatttacaatctctttaggattgaaattctgaggattccatttcatggtaatagagtccgccacacttttaggagtaccattaccaatagcccaggaatctcctgtaccgggtgaatgacaagccatccaatgaatgaacaaacccagtttggcatcttgaaactgttttagaagtttcttgtccgtttgaggattaagtaccgttgtctgactttgcacacaagttaaatatccacatataaacaataatagaaaagagagtcttttaagctgcatataatagaagttatttaagttatttttctatattcaaagaggtgttttaccccatacatctgaattagcggtcatgattttcaaacataaaccactccagattcataaaatcctgcccggtcatagacggatcattgttcttgaacaccagcaccaatgcatgaacaccggtcaccggtttcacttttgtccggtgaatggaataggcaacatccccattcatcggttgcagctcacaagtaccaatcagttctccatccggtttatccaaacggatttcaatagtaccggcagcattctttccccatgttttgcaaatgaaagaattcacctccattcctgtaaaatcgaaatatttccagtaagcacaatctccattccgtatagccgacaaatattctaccggattgctatgtgccggacgccgaacaactaccgtggtatgccccgacaaaagacaagccctcgccgcatccatacgcaataaaggattaataggccccccacaaccttgagtggtcatttctacttcattgatagttccgtccggattaaatacaatgggttccatacaaaccttgcgcatagatgaactagcatgggtaggccgatgataaaagatataccactgcccatctatttcagccatagaaccgtgattgttcactaaattccggtcactcccccaattgtctataattactccccgatatgtataaggacctaatggagaagtagccgtagcatagttcagggtagcacaattagattcaccgtgacgctggtgcccggcatatacataatagtagatgccattccgtttacggaccgaactgccttcattgaatgcatgttcattataagtcaacagtttctcatgtacttcaccttcgatagataacatatccttactcagtttagctcctttggcattggcttgtccccagaataaataagcttgcccgtcatcatctataaagaccgaaggatcaattccatgaattccggctatggcttttccctctttaaaaggtccataaggagaagaagatacagcaacaccttcatcttccttttcattcgtcaggcaatagtataaatagtatttgccgttgtgatagatacaatccggagcataaagcaactggtcggtatagtcgacttgtttccctataccttttgtagcgaaagaaaactgttccacatcccaatttatcaaatcagaagtcgataacacatcataggtatgcgaacaccagacatttgtcggctcatcacgcgaaccatatacatagacacgcccatcaggcatctgcctggcctccggatcggcaatatacacgcccggaggagaaataggattaagcattcgatgattagtcttaagtaatttgggaaccttctttcctgtttgttcggtcacatccgtatttaccatgcgatgctgtgccgacaatcccaaacaaaaggttaagagtataaaaaacagtatcttatttctcataattctatatttttttcagttctaactctaacgtatcatttgattattttataaaaaagtcttttttgatccgtatatcctccaccgaacgacctatcatcaggttgaacttcccggattcgacaacatatttcatatcttcattccaaagtcctaaatcggaataaggaatgactatccgaatatccttagattctcccggattcagactcactttctcaaaaccttttaagcaggcaacaggcgttacaacactagaaacacaatcacgtataaatactaaagcggtttcttttcctgccatgtttcccgtattcttaacagtaaatgtgaattcaatatcctgagtttgaggaatgacactgtcgattttcaatcctgaatattcataactcgtatagcttaatccatgaccgaaacaaaatgcaggtttttcatcttctctggaagaacccaaaccataacccgtccaatatctggaaggtctttgataataatacattgggatttgaccggcatgtttgggaatggtaattggcaatttgcccgaaggattcacttctccaaataatatttcagctaaagcttgtccgccatacattcccggttcccacacatctactatggttgggatgtttttggttatccattcgttatttagaggtttgccatttacaatgacgataactacgggagtaccagtggcatgtattgcttgaaccagttccaactgtcgtccgtagaaatctattgaaggacggtccgccgattctccataagttcttaatccccattccgaacgtattccatatcctccaattgcaacaattgccaaatcggactgccgggcctttcggacagcatcatcaatactgtaatcagagatgccgccgccttcggttatcagcttcttctggatagcaggatcggtagtatttaccgacagttcagatttctttgccttaatacgtccgctattgctgtataagattgactgctcgggagaggctgccgcctgaataccctccagaatagtagttacgtggtcatccggttgaaagatagaccagtcacccaaaatactttgattgtcagcattcggtccggtaactaaaatcttcttgtatttagtcctgtcaagaggtaggatttgccggtcatttttaagcaagacaatggcttctctagcagcttccaaagccaatgctttgttctctttgctaccataactatcttcttcaggagatacataacgcttctcaaacaatcccagctcgaatttaatcttcaagattcttctgacagcatcatcaatacgccggggagatactttcttttccctgactaactctacgagcggacgtacaaagcgtgccgagtcagcagaatacatatgcatatccaaaccggcattgaccgacttacaaacagcctctttctgattttcagctatctgatgcaaagaagtagccaaattctccacatctcccatatcactgataaaaaagcctttaaaaccatactcctgcttgattatatcagtcaacaaccacttggacgcatgcaccggcactcctgcaatatcattatgtccgggcataatagtcatacatccggcctctatggctgccttgaagggaggcagaaaatacgaacggagtgcccgttcagacagttcggcactagcatgattacatcctccgacggatgcgcctcctcccaccagatgtttgactgaaacagccactttcttaaaaggattttcattgtcctggtatccccgtatagcctctttaaccaattcgcttgtcagaaaaggatcttcgccataggtttcaccggtccttccccaacgggcatcctgaacgatatctatacaaggagcaaatgcccaatgtataccggaggaacggatttcttcaccggccttcgaagtcgtgcgataaattaattcccggttgaaagtagcggccatgcttatggaagtcgggaaaattgttctgcccgtaagcattgcatatccatgtgccgcgtccatgcctataagataaggaatcttcagacgggtttgttcggacagtttttgtagttgattgcattcttcaggctccaaatccgccagccatgcaccgaaatcataatatccattcttaaatatggcctctttatcccatacggtaaccatatccatttgcccgaccttttcctccaatgtcatctgcgcaagcaatgcttccactcttttgtctacaggttgtttggcatccatataaacggaggtgtctacctcttgcgtagaccgacaagacataagaaataaaattaaagtatataaaatcaatttcttcatgtttattcaaattttatcgttttataattttcgattgggttcaggcatacattacccggttctattatcgggataactgctccggatagtttcactttcttaccttcataaataacttcacccatttcacgacgttccagacctgtatttaaagatatgaaaaagggaaatagatcgtgtcctgttgcaagactcatgtcctctatcatctcttcccaagtcagaagtcgcatcggatcgtttttccaacgggtatactggatatgtttccaccgggcataccaagtatttccatacgtgtcgtccaaacgttgccagatataccaaagtttgtaccagcctgctccgtaagaaaattgcttggcatactctccgtcatttgtatatctttttaagtctagtttatcaaattctgaagaacggaagaaatctccgcactttttattcgcatgttgccggagttcctcattgtaaagtgcctctacttttccctgaaaccaaccggcatgtgcttctccctgatttccaaaaggtacatcaccagccgcttgtcctttctcgttgaccgggcctgccagtgtatgcgccagttcatgtccataaatagaaatcagactggctgaatcttgactaataataccattctccttaggaaagaaactgttgacagcccagcctcctccacttccggcagagagaacgagaaacatcggttcctcggtttgccgagacggataccactgcaacaatgtatcgtttatcctaaagaattctttttttatacattcaagaagagtatggttaacagtaggcgcataataagtgaccataccattaataacactttccaattccggatagatagctccgccaccacccattgtttggggcaaacgaggctctcctcctaccggaacttgtttctcacataaccagtccattatttggtcaacaaaagcacttcccgcttctccattacttagaaaatcatctaaagccgtaccgactgctatacgtcccttaccatattcacggtaagcgcggataggcaaactgtcactccccatttcccaaggtatccactgttctgaaagagccagaccaatatgccgacgattcttatagttctgataatctttggtataacttgcatcaaaactcttgagcaaccggttcagagaccaattatcgacctgttctgcttttacaggatcagccagaataatcaagctacctccctcagatacaaaatctttgagcaagagacactcctgctccgtataaaccggagcagaagggtcattctgaaaagtaatgattacgttatatctaaaattaggataccaggcaaaaggataaatcttacgttccggatcatatggaatacggatacgggacacccccttctcatccaggacactaccgagtgaggcttgtgacgatacactacgaaatcctttctggtgtaacatatccggcaatccccacatgaaattgaacgaacattgatgcgaaagatcaataaggacattatatcctttatctatcgtcatggcaatgggagcaggaggatatttcttcccgatttcgacaggtagagtttctccggaatgccacgcctcggtgataatttgttcttcatctttcagtgtgcacccagtgacgagcacagtaatccaaagcattaataaacatctgataatcattacttatatacattttatttagaacgttcaacagttatcagtttaccgtctgcttgtacggctctgatagtacattggctgacaggaagttcgtcgggtaaagtgaacttcaggaagttagagaagtattttcgttttccgtctttccagatttcaaaagctaccgcttcattaccgttaattatggttacttgctgtccactggtactataagtcggggtcctggttatcttttgattctctttaaactgagtatagtgacctacatcccctattttaccagtcagtcccagactttccaaacctgcatctccgtctttccgatcttcaatatagtagaaaggttgaggattcggatatttggaagtgtattctctagtttctgcaatcattgcattggtgacagtatagcgatttgacccatattgttcgatagtttcgtctaccggagtcataaatccccacatatcaaagaaatctgccaaattcttttgagcaatgtcactggcatatttcacaaatagcatttggcgctctcctacagggatattattcaagtttctattattacgcaatttcttgaataattccgggtagaaatcggatttgataccgcatcggtggaaataaagccataattgccagtatatacgcatatgaatttccgtatcttccttcttgggatcgccaaggaaattacagaaaggacggttattcagtttcctatctgctaatacgctcaacggagctccgtttgaacattctctccctattttataaagtacataatttgaaaagaggttattggatgactcaaaacaaccggtccaggcaatagctccctggtgaaggtgaccgatttcatgggcagggccccagcagcgtcgttcggtatataacttttcagtaggcataaattcgtccaatgcattaatcccgaaacctatttgtccgttaccggcccacatataactatcgtcattgatcgaggaaccattcacatgattattgaacaatgcaggacgaatatcctccaagcctaatagttcgtattgccagttcacaaaatgatcaaacatagtgatatactcaactatagaattcggctgccactgaagtaacttggtacgatgaaaattcagtaacatttcatttcccttaataagaaaatattcataggtcgccttttgaagaagttctgtgtaaacagcatcagtcttatccctttccaaatcaaaataaccgctaactgtaccggaagtcaatggtatatgaatctttacaggcttcgcattctccgaagttagttcggtgttatacataacaaacaacataccatcacccttcatttggagtttgttgataccttcattcaacatgtatttgtctccactcaaattggaggatcgaatcgcttgtaaactaatagtattcccataagtttctcctaccatgactattaattcatcacctgaatttacatagataccagtaggattatccaaatcagtgtatgatttcatatacagtttatcagcccaattattaggagtactataaggtttgtattcctgaattcggaatttcttttcccaagtatcataagtgccgtttttcagttgcatagctatattgataaaatagccgggcaatgcttgaatttgttgcatagttgcctccggacgcacttcgctacaagtgagatctgtaaatacacttaacagctgtttctcttgttcactcaagcctgatttcatctcataaaattcgatttcttcacagtttacataatcatcttttgcggtattgattacaacctttaatttagtgatctttgctaatggtttatccatagcaagtttagtctgcgaagttgacttcttgaaatcgtatgaacccagaagaatatattcaggtgtgtcttgtgccgcataatacaggtcaaatatcccccaatgacctcctccggtacttcgcggagtataaacaaaataatccaatgtatgtgttccgtcaaaatcaaactcaagaatgacagggaatttcgtggctcccgcagcccaaggactatgataaaaattatttccaccaagtccatcccaacatttttctatttcttgtcccggttgatgctgactggcagttccaccgataggtttgaacataacatctcctcccggttcaacatcatcggtattgggttccaacggtttttgttgaataacacattcagccgctacgccttcatatttctcattatcaaaatgaatagaagcagaacgcacctctccgtacatcgcataattatcaatatggaaagtatgttctttactactcagggcacgtgtatcaggaatagtcgtctcgttcaaccaatcacagacttctggtatattgaccttataatctatattggatgtaattttaagtcttacatctccaccgtcggcagataatgtggtagcagtaagcggagtaaccaaaattgccggaccatatcctagttgccgaaccttgatagtatattctttgactgtcgaaacaacttttactactgcttctctgacctctggttcttcactggcaggaatatacagacgcaccatgttttcgtcaataactttcgtcgccatacaccagtttggggcagaagatgtaatacgccattcatccttggataaattggtaattaccggtatttcgatatcatgttttttgttatcgaaatcctgtattagaaattcttccgctatttccaattgaggtatagaatgattttcatcttcatcattgcatccacagaagactggcatgcagcatataagcataaccaaaattaagcttttgattctttgtatatcttgtttatccatacatttttaatttataagtatattatttgatttattccgcaacccataaatttaactcggcaatagctatagcattcagtattgactctttagaatgagtcgattcaatacgcagatatctgaacgaaccagacattggcaccataagttccgattcataagtggctcccatttctgacaatggcagatcatcacttaaagttttcaataaagtaaagtctattccattctcacttgtataaatattgagctcttgcggatttgcattaccattgttagaaccatttgcggcggttctagtgatatagctaaatttaaaaccactatacacatgaggcaattcaacctgtatatatgggaattccgagaaatcactaggataaccatgaaatgcccaatacgaatggaaggaggtattgatatctccatcaatgatattgacaagttgcgtacgtggatccaatgattcaaaatcttcggttctcgcattactggagatcatgctttctgtcagtttgatctcttttaattctgttatatcaatatgcttctgatatacgataccagccagataagtatttaccccttctttaatgtcaaatgtaggcatactacattcggacaattctatcggtaacatgtatttaccaaatttcaaatcatccggaatattaattttaaccgtagcgatacttgtactttttccggaaacgaacgaaaccttttctgctaaagtataacaattatccggtagtaattcgaaatctgcatgattagtctcattataagcagtcaacaattcaggattaatctttaaagtgcaatcaaaattccaattattttccatcggcatacttataggtatagtaatatcgaaacttgtttccccaccttcttccgctttataaggctgataacctgatttttcaaaatagagataaggggtgacaatatccggaacaataaatatttgccttttatcaatattgatatcatcactagaattattcaagacaagtggcaaaatatagttggccttatccaattctttaattttatcaatatagaaaaacgcttttacctttttgtggttatcggtatcttcaaacgccaatgttggtgtttccagcttgaaacagttatcaggtaacaatttataatccgtttcattttctgcattataaatttgtatattaacagcatctaaaacagaaacatcaactgttgaatatttctttgaattatatccggccctaataacggtgaattcacaactggcttcattacttgtatcataaatagtaacatgctgctctccattatttttaaaatagagaatagactcatattgatccagataatcctcacatccatcatcacaagcgcctaatgacactaatgcgaaaaaaaagatgatgattttaaatatattgtttttcatacagttttctttttgttgatttacgaaattaccacccataattttgtgtcagttgtttgttcaagctgatttctgtctgagtaaacggatacaagtaatgttgttttttgaatacacgtttttcaaacactgttctttcccaaaaactatcaggagttacatcaccgcttccggtagtttccacattcataccccacatcttacccccgtcacattcttcagcgattttccaagtacgagtatcaaaaaaacgatgattttcgaaagccagctctacacgacgttctttacggcataaatcaagtaattcattatcatcagcatgaggataagattcagtaatagacggcagagcaactcttgctctcagctcttgccacacttccattgctttggtataataattagccgggatattcacccctctaattttacattctaacacagcctctataaaattcaagtaaatttctcccaaccggaaagtcggaaaagtaatttctccccattgtccatttgccgaattagccgtatggtcataaaagcgattcaccaaaaaaccagacttaggacgagcgtccgaagtatagccgttggccccatgagcaaaagaagtaagtgtcatttcattaccatgatgccatttgctcccactaaagaaaactgttacataaaaacgcggatctctttccgtacacatctttacagtattcagtttgtaagaagcagctcctccccatgcaggatagacgaaatcagtataagccatctcgtccataggataaccagactcctgatcaactataggactaccgtctgattcataacctgtaataggaaacctacctgtctttgccattggataggcatccacttgttgctgagtaaccccgacaaatccccaagaagaactacctgcaacggaagtaggacatgtatgagccgacattataaaacgccctttcgaaccggtagtccatattaactcactgttccacttttcttgtgttatgccataataattatcatacggatcatcatcatcagagtgatataattggtaaagattgccatcaatgatcttgtatgctgcatctgctgccgttttccactttgccgcatcataattctgcggaaatagattcgttccatcaggatttttaacagaggcatacatcgtatttccattaaacaaatcacgtgcagaataaagagtcaagcgtgagattatggcttggcaagcacctttggtagccaagcccttttctgtactggaagtccaattagacttcatatacgggctatcaatcaacgaattcaactcacctattacataattcacacattcatcccatgtattacggggacgttccagctcagctgcactttttgtaaaatcaagtagctcatcatgcagaatgaataccggtccgtagattctcatcatcagaaaatagtaataacaacgtgcaaaacgagtttgtaccttccactgttctttttcatcattgctcaacaacgggtcagtacaacgatcaatattagctaaaaatatgttacactcacgtatccctctataataagtactcatacgttcgtaaggtacatttgacggattccaagctccggaagtcataatatgatattcacggtcccgcattgaaactgttacttcatcagctgccccgctccatggagtatattggaaatcattagcgtcatccggtaagaaactcatagtagttaaccaatatttacgtgaatccgcacgggtttcccacactttatccaaagtcagcgcttcatcttcctgtctatccagaaaagagtcacatgatgtttgtgacagcagtaaggcacacacaaacaaagaagaacagtatttagttatttttttcatatatcgtttcatattatattagaatttagcgttcaaacctattgtgaaaactcttaatggaggataaatacctccgtctgaacttccggtttccggatcccataatttgaatttactaaaggtcagcaaattactccctgagacataaatacgggtagatttgataaacgttttttcaagaatagacttgggaatagtgtatccaatttcaaaatttttcagtcgcaagaagcgcccgtcccgcatagtaagtgtagatgtctggttattgttagtagaaccttccccaccggcttcactcaatctgggatagtaagcagcctggttctgttccggtgtattggttgtcttccacacatgatcgtaaatatcagcattgattgcactttgattaatattaccggtagagaaaggacgcattgcagtgccgccaatatagaaagtacaatgagctattccctggaagaaagcattgatatcccagcttctccattgggcagtcagtccgaaaccataagtaatctccggaatatttgtatatcctaaagccactttatcatatgtatcaaccactccgtctccattaacgtctctgtatctgacatcacccacacgataagttccaaaattctgttcaggagcattgtctatttcttcctggctttgaaacaatccttcagctataagtccgaaagtatggtttcctccagttccgaatgtttttccaatactgttttgatatttataaaggtgttctacttcgtcgttattcagtaatttattccggttgaatgtaaaattagcccgcccggtcaaaaacacctctccgactttttcctcatattcgagtgttgcatccactccccggttaacagacgccccgatattggttttcggttttgttgtcagtccgacgatagccggaagtccttgtcggttaataaataccccttcacgtttttcatgaaaataatcagcttgtatcttaattctgtcaaacagtctcatttcaaatcccaaattggttttataagctttttcccaactgacatttaaattttcaacatttccgacttggatacctccgcctccttcacttccattctcaccataattccacccattgttggtgctgatagttgattgataaatccaccggtctccaccaatcgcgtcatttcccacactaccataggacgctttcaatttcaattcactgacaaccggaagaattggttcccagaatttctcattagaaatcatccaaccgacagcataagccgggaaaaatccgaaccgatgtcccttggcaaagttttccgaaccgttatatcccatattaaattcagcaaaataagtatccttaaaagcataagtcacacgcccggcaagtccttgatatttataaggtaatgaaagggttttgctataagtcagtttcttgtttgtaaccttatgattgtataaaagcatggcacctacacgatgtttttcggcaaacaaccgattatagttgatactaccttccaaataggtagtaatggaaccactaccactttcactaagtcctaattcgtctgttccggtcacaataggactaccaaaaatcaaattcccgtcttcatcacgacccttagcataatattgattcggtgttttagaacgaacaatggtgttagtattaaccgcatcccaggaaaatttaatagaagctgttagccctttggtgactaaatctcctaaatcctgattgattccgataagtgactgtgcggaattccaaaattgttcgcgatatccggaatgaactaaaagattccaaggattctcgccaccttgcatactcggataagaaagagttccgtctgaatattctttaggataaacaccgggagaagcttcgaaagctctcgaccagattttatctttctctacaccgggaccataaaacttctcatatatattggccagatttacattcagaacagtagactttgttacattaaaatccatattagcacggaagctatatttattgtaacgaagagatgtatcatagtcatatcgttgccctgcatttctaaaaatagaaccttcattatacagcgaaccggaaacaaagtatttacaaatatcacctccaccggatacattcaaatttacccgctggttagaggccatattcttataaagttcatgcatccagtcaacatcaggatacaaatcgggatctgtcccattctggaaatatcctatttgctctggagtataatattcataacctttcatctcattgtataattcagcccattgtgcagagtttacaaattccggcattttggtaggttgagtaaaaccagcttctactctggcattaataacaggtttaccctctgcccctttcttggttgtaatcaagattacaccattagctcctcgcacaccataaacagcggaagcggaagcatcttttaatatagaaaaagaagcgatatcctctacatctactaagtccaaatcccgttcgattccgtctaccaataccaatggagtgttaccaccggtaaaagaagatacccctcgaatatagaaatcggctgcgctggcttttcccggttctcccgtgcgattcatcgctacaactcctgctagttgtcctgccagtacactcgaaatagaagaacccggaactttaacacctgccatatcaatagtggaaatagaaccgatgacactggcttttttctgatgaccgtaacctacgactaccacttcgtcgattttttcagtatcaaactttagagtcacattgataacgttttggtttcctatcgcaacttcctgagtactcattcctatatatgagaatacgagtactccacctacaaccgagttgtcgatagtaatagaatatttaccgtccaaatcggtaatagctcccgtcgagctgtttttaagccatacattggctccgataatgggcatattgtctccttcggaaattaccgtaccggtaatagtacgctttttaggagctgcctggctgtcctttgcagcgtaagtttggattgatattccggctaataaaataagaaaaaacaaccggaaaaattgggtgtgaaataaatttggtttcatgtatgtttattaaagttaatcacaatactaatttaagattcataatacagtttcatttaatctctttacttattaatttcctcctttctttttaaagttcgaccttttatctctttgcattttgagtatacgcaaagaaaggaactttaaaaaagagtgtggggtgggatatttatatttgagaggggaggaattagaaagggggagaaaaaagatagtttttatataatttatccccctcctcctagagaaagctattattttttgtaatcggaaggtaatactccaaactcctttttgaagcattctctaaaataacgtaaatcactaaaacctaccgcataagtaacttcagaaatactatacttttgtgataatatcatttgtgaagcaaccttcaaccgaatactccggataaaagcatttgttgtctggttagtcagttgttttatcttcttgttgagtgtcaattggctcattcctattgtacggcaaagtaacgaaacactcaattcttcattagcaatattatcttctactacctttatgattttttgaataaaatccctatcggtcttttccggaaaaacagtagtaggatcttcctcagacattaagttattgctaaacttttgggccaacatttgtcggttggtaaggatagaatgtactgtggaaattaaaatatcattatcaaaaggcttactgcaataagcatccgcataaacagacaatccttcttgctgtatctctttagatgtctttgccgttagaagaattacaggaatatgtgaagtctctttcgtcgatttaatagcggaacagagttctattccattcatctccggcatatagatatctgagatgaccaatgacggtatttgagacaaacaaaggtcaaaagcctctttaccattgaaagcagtcaatatcttataataaggacaaaacaactcatccaatatttgtacaatacctttattatcatccacaataagcaaagccggtttatcactcatatctctgtctctatcctctatttccggatgtatatattctgatgcagtaaagggaacagaatcctcctgtgagaaggttgttgtctctgataatggttctataagagtattcttattttggaagggaataaaaacttgaaaaacagtcccttccccctcagtactcttgaacagaattgttcctttatgaagttctaccagacttttagtcaaagaaagtccgatgccgactcctgattccgaatagaaacgttcgaaaatatgttttttcacttcttctgtcattcccgtacccgagtcggttatgtgaatagaaacacctttctcttgttccatgacatccaatgtgatagaacctccgtcaggcgtatgcttgatagcattggaaagaagattatacagaatttcttccattttatatgcatcaaataacaaaagaatgtaagaggcatttgtattaaatgcaaactgtatctgcttgtcatgagctatttgaaggaattgtgagaaacaatttctacaaaattccacgatatccccctcccgtagttcgatatccagtttgcctttgtcttgcttagacaatttaagtatctgatttatcaaacgtaataatatagaactattatgttgtatgttcatcagatgacgatgcaattcatccttcgagatatccggcgtagaaagtaatttttgcagaggagaaatgatcaatgtcaacggagtacgaaattcatgtgacagattcataaagaaattcattttcatctctgacagttcccgtatctgttgtttttctttctgtgcaagaaagagttcattcttccttttctcacgaatcttgaaattccggataatcatatatacaatgaatatacttataagtatatataatagtataaaataccaccggagtaaaagcggctgcaaaacctgaatttccattttcagtggttccgaccaagtctcaccattgcaagaggctttcactgaaaaaagataattgccgggaggtatattagtatattttgccgaacgattaccttgttcgctagtaatccattctttatcaaacccttccaacttatacttataaataattttatctgtggaggtgaaatgcaaggcaacgaagtcgaatgaaaaattattgttacgactggataatgtcagtttatcagtattaagaatggagcgttccaatagaatctgcctgttcacttcttctccgactttcagagtcttattatttatggaaagattaacaaaagaaagtttgggaagaatagtatcctccgtaaacacagcaggagtaaacgaggtaataccgttaatgccgccaaaatataaagttccattccttttttctatataagctctttcactaaactcattatttgcaagcccgtcatttagttggtagattttgacggacaatgtttgagggtcaatcctgttcaatcctttattagtagctacccagataaagctattgttatcctctgatatagctttgatacaattattggaaagccccttctgaacattaatccattgatagttccaatcattagtagagggattacgtttcagataatacaatccattgtctaaagtccctacccatatatcaccattcttggcttcacgaatatgaacgatgttatcttgaaacaacagattattctgatgagtggcaaagctaaatttccgaaatatgggagaagacgtgaaacgttctttaccatttaacacaacaagtccttctgccgtaccaacccataaattattctctctatctttcagaattgtacgtatagtattggagggaagaggcaaaacttcagaatcagttttataagttacaacactctgttgagtagaataattataaagagtaaccccattgttataagatgcaatccacaagaaacaagaatcctgcacaatacttcggatagaagggatatttattcctggagttttttgataaacaatttgtttgttactttctatccatgcttcataaaggccatgcatggtacctacccataccttgtttgaagactcttgaccataaattgtatgtatcatatcattagggaaaatcgtcttccccattatttgtttttgtgtggagtcaagtacacatacctcaccattcagactgcctatccaataattgccggaatggtccgttgacatacattcgatgtttttgccagacatacttttttgaaaaggagtctggttcttgtggaagcaaaatgttccgttacgataagtgccaatccatatattaccaaaactatcctcagtaaatgaagtcgtccagggattaccactaaaaacagtttccatagcccgttccggtgtgagccctttcaaagacgtacgatacagaccgtcgaaactagatacccaaagttggttatccgaagaaatgaacaactctctccccggatggtttgtcagttggaaaagagtcgatgttttctcattataaaggtatgctaagccttttttgagaagatagagttgctgtttgtgtacaaaaatttgatcaacatcttcgagaatatcttcctgaaagcgttcaaatgtattgcggactttatcaaaagcataaacttttccttctgccacagttaaatagtatccgttaaaaggaatacataagctaggaaaataataataggaactcaaatattgtttcaattgatatttattattctttttgtcaataacatcaatccgataaatcccccctttacctgtgtatacccaaatctggtcttctcctacagctttgattttgagaatagctctttgtattccgaaatctttcgggaaatatgaagaaatacgtgtaaactggtcagtatctatatcataacagtaaagtcccatttccgtaccaacccatagattgccagctgcatcttcggtgacgtacaacattaatccggtatctaatccgttatcataccgacgatacgttttgaaagaatatccatcataccggactataccgtcaaaagtagtaaaccacataaaccctcttgaatcttgtataacagaacgtacatagttctgtggtaatccattagcagatgttatatgtttaaaagtatactcatttgcctgtgccaaaggaaaaaaatgcataagcaaaatgattaaaagactgtgtgttttttgcataattaatagatttgacttaaatcaacagtcaaagatataaaaaaactgttgtaatattgaatttagtccccaatagaatgggagaaaacgattatcaaaaagaaaaacctctgcttccagaggtttaattcattgatagtggacctggagggtgtctctcgaacctttttataaaatttcacaggatatcaaatatcatgtaatcagttatttatctctttctttcattaatctaaatatctcttaatatcattgtatatctcatttttcgggtgtatttttgggtgtcattttcaaacacacccaattatgaatattaaaagaaatatcattttcgcaccggaaagccgcaaaaaagacggtattccagtcacaaagaatgtgccaatccgtatgcgtgttatctttgccagtcagcgtatcgaatttactacgggatatagaatcgatgtagaaaaatgggacacagacaagcaacgggttagaaacggttgtaccaacaagctaaagcaaagtgcatccgaaatcaacgccgaactattacggcaatacaccgaaatacagaatgtgttcaaagaattcgaggtgcaagatgtaatacccacccctgcacaaattaaggaagcgttcaacctaaagacaaaaggggaaaagaaagaaaaccatgaggaaaagcaaaaggttgaattagacttcatgaaagttttcaatgaatttgtagcagaatgtagcaaacaaaatgactggtcttcctcaaccctcaaaaagtttgcaacagtcaaaaaacacatttatacatttgaccctaatactacgtttgacagttggacggaaaaacatttcaatgactatatagaattcttgcgtacagaaaaaaacatgcgcaacacttccattgccaaacaaatcaaattcgtaaaatggttcttacgttggagtaatcgaaaagggtatcaccaaaacatggcttatgataaattcacgcctaaaatgaagagtgcacccaaaaaagtgatatttctcacccaaaatgaaataaataaactaagaacctgcccaataccaccaacaaagaaataccttgaaagagtaagggatgtattgctattttgctgtttcaccggattacgtcactccgatgtgtataatttgaaacgtagtgatgttaaaaacggtcatatcgaagttattaccataaagacggcagacagtcttattattgaattaaatgaccacagcaaggcaatactcgaaaagtacaaaggtgtgccgttccctaatgacagggcattgccagttgtaagcaatcaaaggatgaacgaatttttaaaagaactgggacaactggcagaaatagatgaaccaatacgagaaacatattatagaggaaatgaacgaatagacgaagttacacctaaatacgcattattaagtactcacaccggaagacgaacatttatctgtaatgctttggcacttggcattccagtacaagtagtaatgaaatggacgggacacagcgattacaaagcgatgaagccctatattgatatagcggatgaaatcaaaatcaacgctatgactaaatttaatctgatataactatggacgaaagaataacatcaatgataccccactacgggaaactcaacaagatatataccgaaataatgtccggcggcagtttctcttttgagaagcagcaattcatttccggcttttacggagagtacggggacacgcagacatttgaaaccgcactcatcagcctcatgcttgaaatggacgccgcacacttctccatattgctgaacagcctgaaacgtgagattgaaagcaacatctcgacttacaacgcctgcagggagtttttcgaccgtctcgataccgaatacgtctgccgacggcatgaaagccgttttgactgggacatcgacagacagatgaaagtcacaaacggatattaccgggaactcatggaagccaacggctctttggaagcggtaggcttcagggagcatgaccgtcaggaagaggaactgctggaaagaaggtacgaacggtgcaagcgggaatacgacaaggaaaaagccaaactggatgaactgtacaaacagaaggagcaggcaaggcgggaagccctgcaatgcctgaaaaaccgttgcggggacatttgcagactgggcggctcactattggcaatccttgaaaaatacctgaccgaccaaaagaaaaaggagggagaggaaaaggaagccgccaccacaccgacaagccaacccgcctacttccccatgaaacttttgtcagccgtttacgaaagatgcaacggtgagcagttcgaagccgtttcagaactggacttctacgccagcatgaacctgcaaccatgcgaaggcagactgaaaataagaccgagggagaaagcccgtgtatgctatctcattttccttatgggtgaaacgctgcccaagccggacagagaaaaatggaaaggggacatcatgaacctgctgggaatagacgatgcatactacaagtcaaaatacaaagagcccgtttccgatttccccagtgacagcaatcaggtatttgcaaaggaaatgcggtcaatattccgatagtcggtgatatgtcccgacactccacgacacgaccacttttaccactcaaaataatttccgccaccctttattatcttctgatatttagtgagatagcgtgaaaccacaatcacgctatccacatccttaccacccgtacccggaactaactttgcactgttcgaacgaggtaaaaagcccatgcgcagggcttgcagtacaaacgttaattcattctgatatggaaattagagaccttttatcaaagcccgtatggcagatgacgggcgaagagttcatattcctgaaccgccatgccttgcaaggaagcgaaacgaagccagcccagccagcagccgacaaggacaagaaatacgtgtacgggataggcggcatagcccggctgttcgggtgcagcatacccacagcaaaccgcatcaagaaaagcgggaggatagacagagccattacgcagataggacgaaaaatcatcgtcgatgcggacatggcgcttgaactggcaggacacaaaagcgggggacgcagatagggaggtgcgatatggacaacaaggaaagaaacatcacgcccgaagaggcggtaatcctatggcaagcctcacggctcgacctttcggaagactacgagaaggcacccgaaattctgaaagtgcgaggctccgtcatcggtacgctggggaatttcagcgcgtcaatcggaaaagccaagagcaagaagacgttcaacgtctccgcaatcgtggcggctgcgctgaaaaacgggacggtactaagctacacggctgaactgcccgaaaacaagcggaaaatactctatgtggacaccgagcaaagcacctaccactgcgcaaaggtggcaaaacggatattgcgcatggcgggactgcccgcagacagaaaccatgaagaccttgaattcctcgtcctaaggaagtacacgcccgaagagcgcatagcaatcgtgagggaggcaatctaccgcaccgagaatatcgggctggtagtcattgacggaatacgggacatggtgcatgacatcaacaaccccggtgagtccacaacggtaatctcctatctgatgacatggacgggggaaagggacatccacatccatactgtcctgcaccagaacaagggggacgagaatgcaaggggtcacataggaaccgagctaagcaacaaggcggaaacggtgctgcaagtggagaaggacgagaataaccccgacataagcaaggtcaaagccgcacacatcagggcggtggacttcgagccgttcgcattccgtatcaatggggaggcactgcccgaactactggacggctaccggttcaaggagaaggagccgggcaaagggaggaggggaaaattcgaccccaacaaggacatcagcgagcagcagcaccgcatcgcactggaagccgcattcaccctgaaagacgaatacggctacaaggaacttgcgggagtattgagggatgcctacgcctctgtgggcgtcatacttggcggaaacagggtgacagacctcattaccctattgaagaacaaacggatgatagtgcaggagaacggcaggaaatacaccttcaagcccgatttccactattagcggtatggcatgggaaccactttactttagtcacgtaccatatatatacggaaataaagtaaagtggatatagcccgtaacatatagagaggtacgggcgaaaacaaaaaaagatgttcacaccgcctgacaagaaaaacagcacgggcatgacagcccggaaccgctttactttagtcagggtgcatatatatagcgaaataaagtaaagcggatgcagcccgcagcatgcagaaggtacgggcgaaaacaaaaaacaatatccacttaaacagaaacccacatgaatacgaatgaagcgaagcggatacgcatagaggaatatctgcacagtcttggctacagcccggtaagacggcagggcaatagcctatggtacaagtcacctttcagggacgagtgcgaaccgtccttcaaggtgaacaccgagcgcaacctatggtacgattttggcgcgagcaagggcggcaacatcatcgcactggcgcaggagctctacgcatccgacagcctgccctacctcttggaaaagatagcggagcaggcaccaaacgtgcgcccggtctccttctcttttggcgggcaacctttctccaaaccgagcttccgacagttggaggcggtgccgctttcttcccccgccctattctcctatctgcggcagagggggataaatacggaactggcaaaaagagaatgttgcgaggtgcgctatcaaactgacggcaagccttactttgccgtcggttttcccaaccgttcgggaggctacgagatacgcaacaagttcttcaagggctgcatagcaccgaaggacatcacccacatacggcaggaacagacgaaggagacctgctacctcttcgagggcttcatggactacctctccttcctcaccctgcggctggaaaggtgtcccggacgccccgaacttgacgggcaggactacattgtgctgaactcgactgccagcctctccaaagcaatccacccactgggcgattacgaacacatccattgtttccttgacaacgacaaggcgggaatggaagccgttcaggaactgcgggaggaatacgggatgcgcatacgggacgcatcgcacatatacggaggctacaacgacctgaacgacttcctttgtggtaaacggtcaggacaagcggaacggtggcaggagaagccggaaccggagaaaaggcaacggcaggcaaggcaaccggagaggaaaggcaaaggcatcgggatgtaaccgcacatgccaacggaaggctttaaaaaagccatagctcattagggctttttcttcacgcaatgcacgcatcgctaaaaaagccccaatgagcaaaagggacgccgccccttttgaaaccccgtgagccatgcggcatggaagcaaggcaggggaagtattaaccgaaaaatgtattacagttatgggatatgcagttttgcatttggaaaaggcaaaaggtgcggacggcgcaatgtccacgcacatagagcgcaccgtacacccgaagaatgcggacagaacgcgaacgcacctgaaccgggaactggtacagttccccgaaggggtaaggaaccgtacgcaggcgatagcgcaccggatagagacggcaggcatcaaacgcaagataggtaccaaccaggtaagggcaatccgggtgctgctcaccggaagcaacgaggacatgaagcgtatggaagaggacgggaggcttgacggctggtgcagcgacaacctgaaatggctccgggaaacatacggcgagcggaacctcgtgtcggcagtcctgcacatggacgagaagacgccgcacatacacgccaccattgtaccgatagtgaccggggagcgcaggaaagccagacaagacgaacagaacgggaagaagaagtacagaaagaagaacacgcaggatgtgcggctgtgcgccgatgacgtcatggcaaggcacaagctgaaacactatcaggacacctacgcacaagccatgagcaagtacggcttgcagagaggcgtggacggttcgctggcaaagcacataccgacctcgcaatattacaaggaactggtggaacggcaggacagcctgcaggagaacatcgaaaacctgctggggctggaagaggaagcgcagaagaagctgaaaaaggtcaagggggaaatcaacgtgcagaagatgaagggtgcggcggtgaacgcaaccacagccatagcggacggggtgagttctcttttgggcggcagcaaggtcaagaggctggaagcggagaacgaaaatttgaggcaggacattgtggctctgcaaaagcaggtacaagccgaacagagggagcagacaaaaatggagaaccgccacaacagcgagataaacaagatagaccggagctaccagcaaaaaatcagggaatacgacaacagactggaacagatagacacctatttccctatcgtgaaggaactgttgcccataaccgaacaatgccgggaagtggggtttaccgaggaactgacaaggcgggttgtcagcctgcaacccgtggagttcaagggaaggctctattcgaaggaacacaaggagaagttcagaacggagcactcgacggcaaccgtggagaggaacccgcaggagaaagggaaattccggctgtgcattgacggcatgcccatactcgaatggttcaaaatgaagtttcaggaactcaaagaaaagctgggtgtaagccacaccccaaaagaagagaacaaaccgaaaagagggttgagattgtaaaacgtaataaaaaataggggctttggtttcatttatttagctgttttttgtatttttgtattggattgagtatgctctttccaagacatattagaatttttagaagcgttatgcttatcttgtagatgaaaacgtaggaaattttcaaagagtacaaggatagcatagtggttctcacgctatagcgtgggctgctatatccatatctgtactcaaggtattttcctacgaccttcatctaagacgtggcatgcagacccacgcttctttttgtataactctgcttagtggggtctcaggcggctatatatgaaaccaacaacatgatttcacaagatgaattttctttatttgaccctcaaaaaatgagagcttcagtcttacctgacaagcccggtaactatatcatagtattacgtagtacgtcctcattgcccataaaagtacaaatttccaccactcctatactaacctcttttgattacaaaaaagagaaatacaatgtcgtgtatgtaggcaaaagcagtaaaagtctgcgtattcgtgactacaaacaacatttcactggcactgccggaaattccacaattcgcaaatcattaggatgtttattgggattcaaactgattccaagagacataaactctccccaaaacggaaaaactacatttggtgaatttgacgagcgtacactgaccgaatggatgaaagacaacctgctacttttttattatgcaaataatgattatgcaaatgttgaaaaagaattgattcgcatatataatcccccgcttaacttgcaaggaaatttcaataaaactaatcttgatttccgcaaggagctttctgcgcttcgttcatgcacttcggcgaaacaagccccaataccaaataaccaattaaaactaaatacctatccacaacaattgcaatgcagcaattgtggtataaatctaacaattgatgaagggttaaaaaataagaagtacattaaatgcctttcttgtggttgtattattcaaaatcccatctacatacaaaataaaaaaaataaagaacgccgacaatggatagcggtattgatttttcttgttgtggttataattttcaatatttcaagtagagaatacagcacttcttcaaagggtaacaatagaatcgaaaactacgggagcaacaaaggaccatctcaaacaaaagctatggcaggagtaagggtctatcttaaacggcattatcttaaagaccctgatagttatgaaggaataagttgggaagcctttggtatatataataaagacaataatacttattttgctcttcataaatatagggctaaaaacagttatggcggttacgtggtggaagagaaactttttgtattggattctgacgggaatgttataaaagttgtagatgacatgaatgaagtcattaatggttattgatataaacaatgaacaaacaatgaagttatgaaggagcaaaatactgaaagactttctgaatatgagaaagcccaaatagagtttgcaaaaggtaaagcggagtttctacaaggatgtggcggttgcctgatgatcccaatcatcattatcattctactttgtatagtaattttaataggtctaatcgcttctccttttatggattaatcaaaaaatttaattctaacttaaataatatggcattatgaaaaaaattattacttctattttcattttgatgttttatcttggttgttcaccaccacagaaggatgtactgtttgcaaacgcttccgatgaacaaatcatagaatggggtaaacaatacgtagtccattccattgaggatagtttaaaagaaggagaaagttacaaaataatggaatggattttggcagaaaaaaagacaagtattcccgttgaggtatggcaaatggataatacatataaaaaagattcaatatcaggatgcgtcaagctattagatacacgaggtattttcgatgaactcgcatttataggaaatggtgatagcgcatttgtagccttcgctgttgcatatacaatagatgaaaagaatgggaatagttcattcttagaaaaagtttttaccctcgataaaagtggtaaagtgttggattgtagcgattacctcagcccttctcaaaagagaaaacaaatagaagaaaattttaacagagctttggaacagatgggtcctattctgattcagacggtaaaggaaggtgcagctatggctggtaaagatacaagcaatgtaacaagtataacgattaatggaaagacatattccgaataatttataatattacgtattatgaagacaaatgaacgtattttaagaatcaacagtgtgttgcgagattattttgcgaaacatcctcaaagcggaatgatccttgcaaaagagtttatgcctctttttataaagaatggcattttcaataaagataatagagaggggttacccattcgaaaagttctgcgagatttggatactgaaaattcattggacaaaattccctatgttcatactgaaaggaaacctaaaacaatcaattggtattttcgtcctttgcttttatcgcttgtaatatttatgggtatgctttcgagttgttcttttaagtcaaataccgatttcccaaaagtgacccatgtagctttccaaaaagaaaaacatgggaaatggggtatggttggagttgatggaaacatcttgtttgaaaataaatttgacaaaagaccgtcttatgcagtaaatggagtgtttagaattcgggattatgatacaaatcaatatctttactattccgcaactccaactccccaattaataggaactcccaaaggttataagcaaggaggcatatgtagcgaaggaataattcctgttgtttctgcggatgaacgtattcactatctaacagaaacgggagaaactgcattttatttgcttccgtatcagggaaaggaattcttatgtgtatctccattctttacggagcaacgtgcttggtttcggttagaaaatcgtaaatgcggatatatagatccacaaggcaatgttgtgatagaacctatttatgataacgctttccctttccatgaaggaaaagctattgtatatcctcaaatccgcaactacgcgcctaatatgatacagaagcgaaaagaatctgcatcgttagtaaaaagggggcacagtgcatcgaatgtcaccataaagacatataaatgccccttaccccaccatgcgacttgaggcaatacgcaaaatcacgactataagttgtcggtgttatccaaagtcattctggaacacattggcataagcattgttgcatgaatagatattcagcacatacttccttgatgtcctgacccatttggctggcacagagatgaacttaaagacaaacgtcttgatgcggcttgttgctttgagtccgaacctcttcacgtcaagcctcgccatgatgaatttatagaagttgcgtatgagtgccataagcagaagaaacaccgtgttttctcccataaaggattttggaagcctgttccagccgaatccgttattcatatcatcgaagatgcgttccttccctccacggaggttatagaattcgacaatctctttctcggaagactcgtagtcatttgtaaggatgcagcggtaggtgtattctccttcccacaggtcgagttcgccgtctatccgcttctgtctttgaatcacaagacggtatgccttccctttccatttctcgatgagaatggaggccagctcaaactcaatgccgcccaattccactttcttccaacctctgagggcaaagatgtcattgtagagcgaactgcatcggttagcacggatatagaaggtcttgcagtgtttagcaatctcttccactatctcttcagaacacgagccgcaatcagctctgaaacggttgataataagcttgttttgttcaaacctttcaaagaacctcttcagcgtgtccttctggtggaaacggacatttgtgttgccgtcgctgttctcaatgccgacaatcaagttgccaataaccgccacgccagggcgataaccaaggaacttcttgtatgtaggcttcgcatcaaacttctcagcctctatgaactggtggtcgaagtcaacgtcatacccctcgccctctttcagctgccctgtggacaataggcaattgaggagcagtgtattcagcttgtctgccgtgttgaagtcgtaggtcttgccagtgtcggatgtgtaggaaatgttatcctgggtcagttcctttatggctctaagaatcgtgtcggcactgcatgtgcgaagtgtcggatgaagcgaaaggtggtacatcagatgagtggtgacatcctcgatgcatgagccgccacaaaaataaacgctcataagcgaacggatgatttcgctgtattgataaccatacagcctgcatctcataccgagggttgagtcgattacagatgagagtctggagtcaaattgctccattattgaaaatattcctccaaaaggagtgagtttctcggatttaattgctacctttgccatgtctgtcgggtttgatacatattttgatttgcaacactaagataggtgaaaaatctgacatggcaaattcctgagcaactttttgttgctcaggtacttaaaaagttatatttgtaatagtgttgcggaattaaggtatataacaaagaagctgacaaatggttagttatcgaccccaatggaaaagaattatttgaagccagttccaatggataccaacaatattcatacaccttttttgaaaacggatattgtttaatagaaaacttcttactcaatgaaaaaggcgaaaaagcacagagattcccctctaatatttatagtatttcacctttcattgacaatgttgctttatttcaagacagtaaaactggattatggggacagcttaacatacaaggagaaagtatcggagagcctaaatattcgcgagctttaggtattgtaggtgattggatatatgttgctgatacaattgctaatttaaaagatgactgggataatcaatatatgaatgtatatgcaataaattctaaaggtgaaattaaaaataaaatagaaaacgtttcatgtttttacccattatcccaatatatcataatggcagaaaatgagaaatattactttgctgacaaaaaagggaatccaatagacaacaactcttattacaaaatttcagttcccccatttacaaatgcccccagttactcatccttttggtcttctttaatagcacctcactccttgtctgattatgatgcttggggagttgcaaccaattatatagatgaaaagaaaacattggcatcaatattcgataaattaacatccgacggcattgacagcttaaaaattggtcaaaccattccaaaaattatggatttatacaatataaaacaaatgccaacaagtggaatgattgacttgcataatagagattggggcataaatcaggtttttgcaacgtattccgttggcattcttcatgaatgtgagtgtgtaattgtgattaaagtaaagattgatgcgagtgcttctccgataggtgataatccaaagaaattgtttgatgctataccacaatatcttacagaaactttgggattaaaaagggaagatgaaaccctttatcgatctgaagatgcttgttatgatattgtttattatgaaggagaggattcattctttttaatgtctaaagcgataacagagaaatagttaagaaacattcatataaatcgaacacttaaaaatattcccgtacagaacatcaaattctgtacgggaatacttttatacataaaaaataattatctaagtattgtggacctggggagaatcgaactcccgtccaaacgaggaaaccatatgctttctacatgcttatctttgcctaaaattttcgaacataagcaagaccaaagccaccaacttatgccttatcctctaaaatttcgtaagagttacgaggaaaaactcaaactattcccgattttactgtgccactttatcaaacgcttcggaacaagagcttttgagtgacatctcgtttctaccactttggcggaaataaagctaatctactatacttcgattaagcagcgagagcataattttcgttgccagataaaattttgataactgatatttaagtggaaattaccgacccactgcatgcttacataccattccaactcgctgtcaattccagtcaagccctaatgatgtttcaaagataggaaatcgccttgataagaacaaacaaaatgataaaaattaaaatagaatatcacaaatcatcacaatagttaatttatttaagaaaggcagatagcttttgatataaagaatgataatcagactatcatttttatttcagggtgcattttggggtgtaaacaatataaacacctgattatcaatattgtttatggagctggagggaatcgaaccctcgtccaaacgaggaaatcataagctttctacatgcttatctttgcctaaattttcgtgcaggaacagaaccaaagccatcaattcccaccttatcctctaaagtttcatcaaaagtgcgaagccacctttgactatccccgatgtaactgcaccactgaaccggaatgcttcggagcaacagcttccgagtgatgtctcgtcctggcaccttgtgcctggattaagctaatctactatgattcgattaagcagcaagagcgtaattagtttcgccagataaaattttgataactgagatttaagtggaaattaccgacccactgcatgcttacttaccatttctgcccgctgtcaaatccagtcaagcccaaattcttattcgtacaaaacagcatttgtttataacgcttttcaagggtacaaagataggaaatgttttcgaaattacgagaagacgttagcaaatattatatcaaagcagtatctttacagggcaaatttattcttaacacaaaaagatatcatgaaaaaacttttaattaccagcttatttctaggaagttgtgtactcctcctggcacaaaaaacgactaaaatacctaatgtttataaacccgtccgttcggaaatgtataagaaaggatggatagacttcaataaaaatggtgttaaagatacctacgaagatccgacagcacctatcgatgcacgtatagaagacctgctcagtcagatgacactggaagaaaaaacttgccaaatggtgactctttacggttacaaacgggttttgaaagatgatttgcctacttctgaatggaaaaaccaactatggaaggacggtatcggagccattgacgaacacttgaacggtttccaacaatgggggcttccaccgtcggacaatgaatatgtatggccggcatccaaacatgcctgggcgctgaatgaagtgcaacgtttctttattgaagagacacgactcgggattcctaccgattttacaaacgaagggattcgcggagtggaaagttacaaggctaccaacttccctactcaactgggactgggacatacgtggaaccgtcaactaattcaccaggtaggactgataaccggacgggaagcgcgtatgttgggatacaccaatgtatatgccccgatactcgacgtcggacgtgaccaacgctggggacgctatgaagaagtgtatggagaatcaccatatctggtagcagaattaggtattgaaatggtgcggggtatgcaacacaatcatcaggttgcagctaccggaaaacactttatcgcttatagcaacaacaaaggtgcacgcgaaggaatggctcgtgtcgacccgcagatgtcaccgcgtgaagtggagatgcttcatgcctatccttttaaaagagttatccgcgaagcgggattactcggcgtaatgagttcttataatgactatgacggttttcctattcaaagcagctattactggctgactacccgcctgcgcggagaaatgggattccgtggatatgtcgtttcggacagtgatgccgtagaatatctttataccaaacacgggaccgccaaagatatgaaagaagccgttcgccaaagcgtggaagccggattgaacgtgcgttgtacattccgttcaccggattcgtacgtattgcctttaagagagttggtaaaagaaggaggactaagcgaagaagtaatcaatgaccgtgtacgtgatattctgagagtgaagttccttgtcggcttattcgatactccttaccagacagatttgaaaggagcggatgaggaagtggaaaagaaagagaacgaggaagtcgctttgcaagcctctcgtgaatccatcgtactcttgaaaaatgaaaagaatgtgttgcctctagatccttcaaagatccgaaaaatagcagtctgcggtccgaatgcagatgagcattcgtatgcgctaactcattacggacctttggcagtagaggttacttctgttctaaaaggcattcaggaaaaaatgaaagataaagcagatgtactttatactaaaggctgcgacttggtagatgccaactggccggaatcagaattgattgactatcctctgacagatgaagaacaaaaagaaatagacaaagctgtcagtcaggccaaacaggcagatgtagctattgtcgtgctaggtggcggacagcgcacgtgcggagaaaacaaatcccgcagcagtctcgacttacccggtcgtcaactcgatttactaaaagcagtagtggctacgggaaagcctgtcgtgttggttcttatcaacggacgtccactatctatcaactgggcagacaagtttgtccctgctattctcgaggcatggtatccgggatctaaaggtggaatagctgtagcagatatactctttggagattataatcccggaggtaaactgactgtaactttccccaaaaccgtaggccaaatacctttcaacttcccttgcaaaccttcttctcagattgacggcggcaagaacccgggaccggacggcaatatgtctcgtgccaacggcgcattatatcctttcggatacgggttaagttataccactttcgaatactccgacttgaaaatctctccggctattatcactcccaaccaaaaggcttatgtcacctgtaaagtgaccaataccggaaaacgatcaggagacgaagtgatacaactgtatgtacgtgatgtactgagcagcgtcactacttatgagaagaaccttgtcggattcgaacgggtacacctgaaaccgggtgaaacgaaagaaatcactttccctatcgaccgcaaagcactggaactgctgaatgcagatatgcattgggtagtagagccgggtgacttcacattgatgctgggagcttcttctacggatattcgtctgaacggaacactgactgttgtagagccggggcaagctcctgccacaaatacaaacaaggacagtactcctgtcagtgccagtaccaatgcagacacagtagataatgtaattgataataatttaactacgttctgggaaggcaataaaggggactacattacctttaccttacagaatggagctaaaatagacggagtatccattgccttctcccgtgagaacggactggaaactgacttcgagatacaactatcgagtggcggcggacaattcctcactgtatattccggtactgtgaaagagtacaataaactgttggacttccgtttcaaaggaactactgccagcgatttacgcattgtactaggtagtgaccgagtaggagtagcagagataaaacttccccaactgcaaaaataggaaaaggcgtgtttaaaaagtcggtagtatcttcaattccccttctttccgaaagaagaaacttttcgatactaccgacttttctatcagtcttttcctctaaattattttatatgttcatttccatcaatctccccagcccggattatttggcttcaacttaggattcagagccatttcgtttaatggcaaagaaaataagtaatgtttgggagattcaaatatagccggggtagtcacacgttttccatatacatccaaacttccatctgcataagttcccacttctgttttcaatacagcgatttcctcaggtgtgtaaacatctgtatatagcatcattcccgctttgggggctaccagtctttcaccacatccccaacgcatcaaatcagcgtaacgtaatccttctccgaacaattccacgcggcgctcacgacggatctcacgaatcaaatccgcattagttcctttaataatcggatgcttggctaccagtttagggtcggttgccggcgaactggttagctttacattaaatccgacacgttttcttaaagcatttacagtcaaatccaattcaggatcttttcctaattctgctccggcttcagcgcgaatcagtaacacctcagcataacggaatatgatagcatccagagtacctacgccatgagtatcggaaaactctttttcgttataaaacttagcaattgcgtatcccgtactggaatgtgtccctccttcaaggaaagaagatattgaacttcttttcccttccaaataataagtataaggtcctgcatacggggtcgcgattgtctgcaacagacgtgggtcacgattctccaattcatctttaaccgacgttacccccgtctggtcatacggttgccctgttattgtcaaataatcatccgcacaatctttgctcatacccatcatttgagccatttcacccaaacgtagttgccgggttacattattacctttatcaactttggggtcatattcttttgatagaataacctctgtgttagtattataattatcctgaataaataattcgtgatatgccgtagcgggagaagttccttcatacaatttatatccatattccgatttcattaattcaccagcagcatcataagcggcttgtaggaatttggtgtcattttctatattatggtaacgacgataagtaccctcaaacaaacagattcgtgcttttaaagctaaagccgcatctttactcaccctatatacctttgtctttttaggcaaccatgcaatagcctggttaatgtctctcaatacattatccatgacaagaatccgggaatcacgccctttatataattcttccgtatcagaaggtgtcagtgctgtgtcataccaaggaagatcaccgtattttcttactttattaaaataatccatgcacttgaagaacaagatttctccggcgtattgttgcttcacaatttctgtttccggtgatttctcataattcattagaaactcgttgcatgcacgaatattctcccacttccaatcagacccttcatcagaagcattttttacagctatctgatgtccgaagcttacatcattcttttcccaaggaagaatattgtccgagttccagtcgtcttccaacatcgaattgtaccctttaggggcaccatgaccgttaatcaactttggataaaagtcattgcaatattgttctaaagcattggcattggcagattcaaagaattttccggtttcaatgatatcttccggggtcctgtccagaaaatcgcatccctgcataaagaatgccgctacccctagtcctagtataattatttttttcataataaacagattttaaaaagttaagttaataccaaatgagaaggtccgactaaacggataagccttaccatcggaagtaagattacccaccaatttattgtctttggagttggactgacgtgtactgacaatatccggatccagatacttaaatagcttagtccctacccataaattctgaccacttgcaaatactttcaattgctcgattccaactgtagatatccacgctttaggtattgtgtaactgattgttaaatccttcaaacgaatatatgcaccattctgcaagtattttgtttgggtttgcttactcctgccactataacttggaagcgggtaataggcattggtattattctcactccaagaattatcaacatggtaatcattaacagcagattgccatacattgctattactcggaaatccccaaaacaccgggctgtcaatccataaatctcttttagctatcccttcaaaaaagacacgcacatcgaatcccttccaggaagcactggcattgatattgaaagaataacggggagtggtgttacctatcactttctggtcacctgtattatagatagtcttggcagatgtaataccttccactccatccaaatctttataacgtatgtcacctactttccaagtctttgatatatctccctgaatagtagccattctctgagcttctgcttcgtcctgaatgaatccatcagttacataccccccatatttctccgattcgcttaccttcatagtaattattcaaagctccttccggattatcgaattttgtaatagttgaataactgtctgcaagtcctacaccgatagaatacattaacggactgcctccgacattattaatcttatcattccaagaaacagataattcccaaccatttgtccgcatattcgccaaattttctttaccaccggaacttcccaatacggccggataggttttagaaatcaccatatcgtttgtattacggatatagtaatcgaatgaagcatttaaacggttattcaacatagcgatatccagaccgaaattggtagttgttaccttttcccaagtaatattggtacttgccaatgtcggtgctttcaatccggatataacttttccacccattacataagataaagtttcattatccagataacctaaatagtcaaaatttccgtttgttacctgattgcctagcgttccgatagaagcgcgaagctttacattatcaaaaaggttgcgtgcaggttcaaaaaacttttcttccgacagtctccaaccaacagacacagaagggaaaaatccccattgtgaaccgcttttatatttggaagaaccatcataacgtccattcacttccaacagatatcggcctaaatagtcataattcaagcggaagaacatgccttgtacagcccagaccgttgcatcttctcctatagactgcaaagtagtagcaaggtcactgaccggagtattgttgtcgtacagtcctgaaacttttgtcttcaaagctgttatttttttactttcctgattatatccggccatgacaccgaaagagtgctgcttgatagttttcttatattcagcccagaggtttaaagcttgataagtgtcattgtacttatcattatttaccccatttgaacttccttgcggaatacttgtaccatccggttgtgattgatacaaaatattttgatgctttttctgttgcttaaaaaacttatttcctgtataatcccctttaatggacaaaccttttatcggagtaatattgaatgctcccgtataccaaaagtcatcggaagaagtaatatcacgtcctgcttgagccatgattcctgcaatattatagttgaagttagaaccggccacagctgcaaaatttccatccggcagataaaccggaataaaaggaaaagcacgataaacttcatgataaggactacttcccatataatcgtatgtattcggaatgtccgactcgttacggttatacttagtccggaaggtgatttccaaccagtttgtcaattgagaagtaaaattgaaagacatattgatacgtttataagtatcatctccaaatgcaaataatccatcttgtcctttgtatccgatagaagcataatatgaatttttctcagttcctccgctgatactggcattatgttgctgcatgaaagcagatttcttatagaactcctcgaaccagtttgtattagcagcatacgcccactggcctatacctgtatacttgcctgtttggtctataaatacagaagggttattgaccgggtcactattatacctgtcaatggcttctactaattcagtggaaaagtctccgttaccaccggaattaacactagcctgattaattgcatgaatccatttgctggaatttatgccttcgggcaatctggaaggagacgaccaggagaaattgttgttgtaattcacacgcactttctcacctttagtacccttctttgtagtgatcaggaccactccaaatgcagctctagctccataaacagcagctgaagaagcatcttttaacaccgaaatgcttgcaatatcctgtggattgagcaaagaaatatcattagtttccactccatccaccaatataagagccgagccaccgttcaatgatgttgttccacggacattgatttgcgcagttgcgttaggactacctccatcaaatgttatattcaagttgggaatagctccttgtaatccttgggttacgttagctatcggccgatcctccaacacatcgccatcagccatagtaacggctcccgtcaaatttaccttcttttgggttccatatcccactactactacttcatccagcacttcagagtcctctttcaaaactattttaaaagaagtcttaccattaacgctcaatgtctgacttttcattccaatataagaaattgtaatttgagcattggatgctacattgttgagagtaaaaataccgtcaaagttggtaatactaccattggtagttcctattaccaatacactggcaccaataatcggttcgcctttttcgtccgtaacggtaccgctaactgtcagtgattgccccaaagtattcacggacaaacaagaaagaaataacacaaacatgcttcgaagaaacatgaatggcagtgttttacattgtttcatagaataaattgttagttagtaattagatttatatcaaggtcacattaataataaggaagtaaacaaaatccctatgcgtgaaatcggacaaggaactgtttacaataattaatggttaacttgttcttttatttattaaagtaagaggatgtgcctcacggcactatttatttttgcttatgtgtattatttcattgtggtattgcaaatataccataaaattcctaataatcaaaaaaaatagtctttttttgaaaagattagttagcgctttttcgaatatcgaaaaaatacataattccactcctctatcccaaatattctcttaaaataaaaacaatcctaaagaagaattccagcaaattattgactttattccaagtcaatcacttacctttgtcatactgatacaatttatgcaatattccgtacaacataaaatatcaatatcatgaaacaattattgattacaactcatttgtatacattcgctgttatctgtgtaattgcaactaccattagtagttgtacctttaaaaaaaagactgatatggaaacaccaaccggaacaaaggaaaatgaactaaccatgctagtaggaacttacacgtcaggagacagtaagggaatttacagtttccgtttcaacgaagaaaccggaacggcaaccgcacttagtgaaacggaagtagaaaatccctcttatctcgcagtttctgctgacggaaaatttatttatacagtcagtgaattcaataatgaacaggcggccgccaatgcatttgccttcaatcaggaaaaaggaactcttaaattattgaattcacagaaaaccggtggtgaagatccttgctatatcattacaaatggaaataatgtgataaccgccaattacagcggcggcagtatctctgtttttcctatcgcaaaagacggttcactcctgcctgcttccgatattataaagttcgaaggttcgggaaccgataaggaacgacaggagaaatcccatttgcattgtgtccgtatcactccggacggtaaatatatgtttgccgataatttgggaacagaccaaatacataagtttatcattaacccggacgcgaatgcagagaataaggaaagttttcttaaagaaggttctccttccgcctttaaagtgaaagccggttcaggtccccggcatctgacattctcacccaacggtaattatgcctatctgattaatgaactgtcgggtacagtaatagccttcgagtataaagacggagatttaaaagaaatccaaaccatagttgccgatacagtctgtgcaaaaggcagtggtgatattcatatcagtccggacggcaaattcctgtatgccagtaatcgcctgaaagcagacggcatcgccattttcagtatccaaccggataacggaatactgacaaaagtaggttatcaacttacagggattcatccgcgtaatttcattattacgcctaatggcaaatacatgctggttgcttgcagagacagcaatgtcattcagatatacgaaagagatgcagacacaggcctgttaacagacatacacggagacataaaagtagataaacctgtttgcgtgaaatttatacccaatcccaaacagagctaatattcacaagacctaaaattatatatagcctgatacttatattctctttcaagtgtgaaacaatttaaatgtgaaagagctaagctgattaacaaatcagcctagctcttcattcaggaataaaaaagcatccactatctcatttgatcaaactacgaaaggcctgaatcccctgatgattaatatccaatttttctacctctttcaataacctggcagatttctctttctgattcaatccccaatatcccaatgccatcatatatttgcaatgaattatattccttacagtcaagttatcctcccaaatcaaaagatcaggcaatgacacagcgaaataatccattttaatcttgtcaaacaaatgcttctctccgtaagaaatcaacttatgaaaacgtccattcgcctcatctatgcgtcctagttttagtaatgccaacccctgataaaatattttatcgggtttcgcatcattataatacatggcggcggcaggttctgtcggcccaacagtggcctgttcccaatatctgacagcttcatctttacggttcagattttcataagcgcaacccaagaaataatagaaatcattctcttgtgcaccgtacaatttgccttcacctaaatgatgcggatattccaagcattcttccaataatgcaattgcttcttgattattgccagcagtcaatgcttgcttagccagttccacacgggctagttgatattgggcaggtacttttccctcaccaccttcccaagggtggaagctatgtgcatcaagcaatgctttggctttttcatattcaccagtctggttcaacagagttatttcttccaatacaagatcgtcacgttgctcaatcaaatcaggatattgccgtaagaaagccagacgttccttatgcggacgacgaacacgtttataaagctggtccaattccattagaatacgtgcatctgttgtatcaagccgaaaagcacgttccatgtattcgatagcctttgtttcttcattctttttattgaaataagccagagccagattacgccatacagtcgggaagttatcatctagccgggcagaagtttcccatgcttccatagccaagtcgtactgacgtttgtcatagtatagattacccagataataaggagctttagcatcatgcggattttgctccatggcacattgtaatgcaaggattgcttccagacggttagggaaacaataatcaggacacatctcagccgcttgggcaaacacctgtcctgttcccggcaattccccttgaaccagacaccagcctaaataataataagtcataggagtaacggcactttcagttatagctatattccataaagaagcagcctcttgccaacaacctgccgcacaataatcaagcgctatttcatcatagttatgaggttcgccacgcatcatttccttcaaagtagccaactcgtcagaaacattggttatcaaatatttttcataacgacagccaaagttgaatttatcaatggccaatgaatcctcaatcagttgcagagcttcttctgattgtcccattcggcggaggatagcaacttttaaagcacgggctttatgattgtgccagttgcggattagcgagtgattaatttcatccaatgcatctgccaagcggttttgcatagtagaaatctgtgcacaagcaaaatatccggcatcctgccaagcagcattccagcaagctttatagaaacggtcgtaagcctcattgtaatgtccctgatatttcaaggcaaggccaagattataaatcggttctccgtcataaggattcggattacgtttttgtagggtcttcacggcagtaagcagatattgttctgctttatggaaacgccctttacgtatataccacagaccaagcgcgttattattacgtacatcaatcggatcacgccgcaatgcttcttcgtagtattctacgggattataagtagcatgcctgtattgctccaaatgcatacctgttaaataaagctgttcagttgtctttatttcttgtggaaatagcgcagcttcggcagcatcaggaataggtttcacttcttccggttccgcatgccaataaagcaattcccttccgtttgccgtgatttcaagaatcagtttattaagtttctcaccattcacatttaccacttcattcagcaattcttccggggtgatagtcacttccttgctataatacactttaccgtcttctcctttcaaaataacgtttaccgtctgacgagaagtagcaaatatcttacaacgtacacagtcttctccttccggttcaatgttcatcagcaaatccctgctggcattcttcaccactcccaattcccggtaaggcaggaaatattgaacgaaactcttttcttcataaggttgcagccaagtaaagtccggttgattttcagtatatacacctgccattaattcaatatacggtccatcctcatcggtcagattacggtcccatgcacgaccgaaatcaccgttcccccaagtccattgtttcttacccggagaaatatggtgattggctacatgcagcataccggcacgggtatcattctcatatccaccctcgaagtcaaagcgggaatttacagccatataggaagtaggaaccttgatattcttatagttcgagatgtccactccggcggaatagtccatcttataataagtacccgttgcgataggaaaactggatacggcacgttttccatggtcgaacacggcattgatatccggcgggaatacgctctgatagtaatcattcaccgctacggcaggattcgcccaccacagaaaggtctgcggtacttcggtacggttgtaaagtactcctttgatttcaagaaaagcatgtccgggacgaagtgtaaaacctgccattcccttctgatgaaacatacgttccatttcatttacccataccgtgacgcttccgtcggcattttcctcaatagtcgtatccacgggcatataagtactggggcgatgatgttgaggccagttaaattcgataccaccagaaatccacggtcctgcaagtcccaccagagccggctttatcacatgattataataaataaaatgacgctctctgattttatcataggccatctgcacacgtccacccagttcaggcagaatcatcactttgatatattcgttttcgataaaaatagcattgtattccttatccaccttttcatcggacattgattcaatcacaggataaggataaactaccccactactgccttgatacacccgtttctccaggaaaatcggattcttctccggtttacctacttcataggtagggataaccaccttttctttccatgcttttaccatcgtattattgattataaatttattttttattcgttgacaaaaaaacaaaagacaaagaagatcggagacagggaggttttatatcctcccagcctgattaatgatgttatgcctatttacttgctaatttgacaatccgttatcgtttatttaattaagtccttttctaatgcttccagcgatttgcctttcgtttcgggcaatgcacggaagaagaacaggtagccgacagcacaaatggctgcataaatccaaaatgtaccactgcttcccaagaaattattcagtagcgggaaagtgtatgtcagtgtgaaactaccgacccataaagcaaatgtacaggtagccatcgcaacggcacgtactcggttcgggaagatctcggcgagcagtacccaggtgattggccccaacgacatcgcatagcaagcaatagccaaaacgaccagcaccaccataaagaatccactgacttcgaagaaataacaagtacccagaataagataaatgcctgccagtcccccggctcccaacagcataagaatacggcgtcctaaacgttcgactgtatagattgccacaaaagtaaaaattacatttgccacacctgtcaccacaatattaaagagaacatctcccaatgaatatcctgcggactgaaatatctcctgcgcataattgaagataacattcgtaccgcaccattgctggaacacagctacgataatacctaaaacaagcactttacggaacggacggctaaacaacaaccgcaatcctccttccgacttcgaagaaccggtttcttccaccaggcgaagttcctgaccggcatagtcgtcaccgcctattttgctgagtacattccatgccttcccttctttccctttcatcgccagccaacggggactttcgggaatgaaacatgccagcaacaagaatatcgcagcagggaaggcagccgcccaaaacatccatcgccatcccatttggccattccacgaagcgcagatatccgcgagagagaagtctgcaggaataggctccgcaatcagccagtttgtgatttgagcgccaagaataccgagcacaattgtcaattggtttagcgagacgagttttcccctgattgaggcaggagctacttcggcaatatacataggagaaagtcccgaagcgattccgatgccgatacctcccagaaagcgggcggccaggaaccagctaaatactgaaaatgccccggtagcataggcagaagacaagaatatgaaagcagaaattatcaggagaggtttacgcccataacggtctgccatcatccctgccaccatagcgccaatcagacagccgagtaaagccacgctcatggcaagtccctgcatggcaggcacatcggctatatcgaaatagagttcgtagaaaggtttcgctccccctatcactacccagtcatagccgaatagaagtccgcccattgcggatactaaacagataaaatagacaaactttttattataacttctcataccattagaagattgattgattaattgattttgcaaacttgttttttagactttcgaccgaacacccggtactccttttttctagtccaagcccctataaatagatgtcgcttttgtttctatcactttaccttcattctttagtatcaggcttctgatatcctcttcgccaagcatcgtccggggagcaaaactttcagaattcatatacgtaaccaggctgtaaagcatctgttgtatttcaggcttgtcgcttccctcggaaagaatatccatagcactcattatcagttttccctttccacattttgtttcaaagacagataccaactttctgttatttgtaaaattgtcaatagattccacaatcggttcaaccggcggtaacgaatcgacaaccagtactttcgacctcttcaccagattccaccattgccagttgctatgcatttctgtagggaagtgccgcaaagccgcatgttgagtattgcacagaagtcccattgttcctgcctgtctggggaaatggacaggactccagaagaccggaagaaacttcccttccaatcctttcagataactcattttcggagaaaacaaaacttttcttccttgcttcaacgcagccaaagcttcttctacatcttgagtcagcaggacatctccgacattcaatgattcgatacgaggatatacccaaacaggccacgtatttttccattcagttccttctacagataccgtgagatacaactttgaagccttccgtacacttttaagttctgtacggatatctccacattgtgtcactgttcctttggatatactttccacattcagtctgccgttcgagatttgcgttcccgcctcatcagccagctgccacattatctgtttattatcaatagccgcattcgaatagttgacaacttcaattgatgcagagaacatctcatcaccggaataaaccgctttagcaaaacgagccaacggaacaacaggcgcacaaaactgcctgaaagcagaagcctcaatcaatcctttcgaatcccagaaagcatccaaaagtccgaccagtgcagttccctgtcccgggaaatcatgcaaatccaacaactgaaaaccgctgaactgctttgttttcatcgctctttctatctcctccttatataacaagaccgccaattttcccgatgcttccagaaaatcctccgctttcgaatataatcctttcttctgtaaatcctgtttaacagccttaaaattcagaggttccagtactcctgtgtatttctctatttcttttagattcggaaatacggcatactgcccaatctcatgagagataagagggacattcatgtcctgcatggcggcactgtaatctttatagaaacaaggtggttcctgatcgaaaataccttgtcccctcacccaacctttatctgtccattgcgtgacaaaaaagtcatcttccggctccggtttcgctccatgtcctttttcgaaagtaaaagtcgaagttgtatataaacgcctgctatctttccctttcatatatctgaccatgtcattcaacagtttaaaatcatactggagttcattaccaacactcatcatgcagaatgacgggtgatttccatacgcttcgacaatccggtcaaattcgttataaagaaattgggtcattgcctcatctttgccgatagtataagaccagttcggcagttccacctgtaaatagaaacctaacttatccgcaacgcaaaatgccgcttccggcgggcaccaggaatgaaacctcaaatggttcagcccccactccttggctgtggcaaagactttcatccaaccttcttccgtcatcggcggagtacctgtcagaggaaaaatacaacactctaatgttccgcgcaggaaaattctattaccgttgaccgtcaggatgccttgaccattatctatctcgcgcatcccgaaagaaacatctttccgttcagttttcttcctgtcaaaccggcaaactacagacaaattatataattcaggagtaaattcatcccatttcttcatatctgtacccagcgaataatcatattcgagcttctgcctgccttcttgcaaagtaatctgaaattctttttctacaaacttctgtccaccttcaggctgtccgacctgcaaggctagtttcactttctccggtttatgcccgctattctccaaagtaaccgccacccgtatcttcccatttctgacatcaggataaacattcacatgctgaatactgactttctgccgggcagtcagtttcatcttacccaacactccattccacataatctgagtgtcattggtataagcatgtgccaggtcgtttgcagaaatatcatatcgctttctattgtcaatacgtaaagctattatatgtttacctgccgacagacctttcggcatgacaaaccgatgaggagcgatcaagctttcctgtgcacccgccacttcttctccgtcaatccataaacggctctgccacaggactctttcaaaagagaactccaacggctgtcctgccatacttttgggaatattaatctcacgcttgtaccatgcgacccctacataagcgttcttacgggtcagacgaagcaactgcggtttttccagtttgggaacgagcctgttggaagtccctttccgggccaaatctgtggttccaggcaaacttatattatcggagaaagatttcagataccatccctctttctcccctacatctgtactatctaaagccaattcccaatttccactcaaatccaacagattttgggcggcagaaatactggaaattcccaataatactattaataagaaagatttcatattataacttttcataccattagaagattgattaattaatattgcaaagatagaaccggttgagtagacaaaaaatagaatttcattttataaagatagacaatcttatttttttgccctatatttgataaatagtatacattactatatatttgcataaaacagttgaatcacatactatgatattatggtaaagttaaaaaatggatttaccggagaaagggctttagtgcttccccgaatgattgttgacaaactggaggaagatcctctgacctccatgctccatatcacggatataggatattatccgaaggccaaacatcacttccgggaacgaaaagaaccgatcaatcaatatgtattcatttattgtatcgacggggccggttggtatcggataggtgaacaggaatataccgtttccgccaatcaatattttatccttcctgcgggagttcctcatgcctatgcttctaataaatcttctccatggactatttactggatacacttcaaaggtatccttgctcctttttacgctcaggaagcaagccgtccaatggatatccagcccgaatcacattcacgtatcagtacacgaatcaacttgttcgaggagatattcaatactctgaagaatggttacagcaatgaaaacctgcgttatgcgttctccatgttccatttttatttaggaacactacgctatatacagcaattccgcaacgctgccacacataatgactcaacagaagatgaaaatataagcgaactggcaattcattatatgaaagaaaatatggagaaacacctcagcctgcaagctatagccgaccagatcgggtattctccttctcacttctctatgctgttcaagaagaaaacaggacatggcccggtaacctacttcaatttattaaaaatacagcatgcctgttttttactcgacaccacggatatgaaaattaatcagatatgctataagataggtatagaagatacttattatttctcccgcttattcagcaagatcatgggaatgtcaccacgggaatatcgtaaatcgaagaaaggataactgcctcgaaacttttagtttcaagcctttggaacaatagtttcaaggcggtgaaactttagtttcaaggcgcgaaacaaatagtttccctatatggaaactttagtttcaaagccttgaaactaactgaagtaaagcttgattctgacgaggaactacaagggaagtatgagaaatgcaatacgaacagtatgagaaatgactgttttttatcggttttaggttaaaaaagtatgagaaataccttattgaaaaagtatttctcatactttattatattgattaataacaaattatctaaaaacaatgagaatatgagaaatgcttttctcatttccggttcttcgccaaatttggtggtaatttaaccagtcggtggtatctccattcccctccttcggggaaggaggggtggctgaaagccggggtggtaggtggatacacaatgcagataataactgacttacgcattcacctaccacctccccctacggggactcctccttcccgaaggaggagaatggagaatactatcgactatcaaattattgttgaatactatcgattatcaaattattattttcctaattaagtttaccaccaaatttgaagaagaacctcatttcccttctggtaggcgagggctactttttctctatcgacagcacaaattggcgtaaatatacttgttgttcatcactacccgcatttgtaaatcgaacgaatttcaccggggctttttgcagtccggccgtcagtcgggcatctttctgcttcaagtcgatcgttttccattctttaccgtccgcggagatttcaaaacgtccccatgtacaaggttccttctttccgaaattaatatctatactttctgccggatagatattatccaattctatttctatgaagtttcctgccggccatttcacgacttcgttcatcggagagataagtatgcggttcgcctttatttgtaatggcaaattctttatttgctccacattactgataagcttatgtggcatataatctgttgtggcatccaaatcggctccatacttctgattatatcgttttacggcagtcgcaaatatctggtcaatcaaaggctttataactttggaggctgtcttcactcccggttgataaggattctgattataattctggtcggtataaaacattcgttgctgcaaagctttcacatgattatatctccgtaagaaaaaagacttcgaatcatttttgaccattttcagtacttcttctccggtttcggccagcagattgaattgatgaagccacggagttatttctacaatcaacggctcgttttctgtattcaccaataggatatcgccagcttccttcatctgttcaaatgtatcccacaagaggtcaaaatcaactttttcatattttccactctcaacataactgctaaggaaacgtttggcaacgggttgaatattcatagactcttcgcggcgataaccgtgtccattgggacctaagtcggaattgtgcatggcaaaacattccaattcgtccgcagcccccggaagaatggtacggatagcgtctttccacgttttccaagtatcatatttagtaggattccatgcatagcttgcaacactgtaaatagcaatcttagaggcttcggcgtgctccataggattggtcacaaaaccggacatttccttcgctattgtggtgtcgttgccataaacaggtccgagcagtaaatggtcgcgtacataatcggataccggaaaattccaccaaatgtaggcgggacgtttaatgcgttcgttaatccaggaaatgccgtcgcgggtaatatcggaaatcacacgatcacctgtccacataatctggacagaaggattcagtttctcacctaatgtagtcagataattgcctttggggttcgaccagcttttattatactccgtaggacacatgataagcggagttacatccggctttgcctttacaaacgcctcatcaatatagttcaataattcagcttgcttctgaggattggtaccttcgcccgagatgtcatcaaagaacaccgcaaaggaacggacaccgagctgatacatcttctcaaattttgagagcaataaatcacggtcttcctggttccatttgatatcctgtcccgggtgaatagcccatacaaaatcaacttcattttcattggctactttcacaagctcctgcaattgggctgcttccttttccggataaggcaaacgccagttgggagcgctgtgatacggatcgtctttaggaccgtagatataggtattcatcttattctcaccataaaacttcagttggcgaagacgtgcctgatggctccagggagttccgtagaagccctccactacaccgcgataacggacagaaggataatctttgatttccacttccggcaattttccttctttcagcaattgggcgaatgtctgaatagcataataagtgccccgttcatcattgccggccaatatgatttctttatcattgacagccagataataaccttcttcatgtttgggaatcagcttgttatacttacgtacacttttgtctcccttctcaccaatataaatacggattccttccttggtactttgcttgccggtaaggataccttgcaacgctttcaccgcatgcgggtttgcttctttttcaccttctatccggtagatagcaggaagactgagtgttttaccttgttcattgagttgctgtgggggcggctgtaaacttacattttgtgcaattgaagtgagtccacacaacaaacaggctcccattaaataaatctttctatttttcataagtaattaaaaggggggttagtatattattatacaaagaaatacaaatcaatctagttatacaaatttccgggagacagataacatagattttagaataaaaaagaacaattacatattgaaaagttcttaaaaaggaactattaacaactcatcagccaataaaatgagaaccggattgcatactacatttaactttgaacttaaagattcataattggtagtggtatattccattatttgtcttacatttatgacgttttatactttactaactttatatataatacagcatggaatatatcaatcgtttctactggctaatagctttatgtcttattatttccaccggagccaatgcttccgtaaatcccaaaccttttgttatccccgaactgaaagaatggaaaggcagtgacggaacttttgttcccaccgaggctacaaaaatcgtgtatgccgccaacaatccggagcttgaacgcatcgcacgaatctttgcccaagactatcaaacaatgttcggacgttcgctcgaagtagtgcaagggaaaggagctgccggcgactttatcttttccctccgcgccgacaagaaattaggaaaagaaggatatacgatccgcgtcacagaccggattgctttatccgcccccgaaaatatcggtgtatattggggtacacgtaccttacttcagattgccgaacagtcagaaaatcatcagctcccgaaaggaaccctgagagattacccagactatccgcttcgcggctttatgatagactgcggccgtaagttcatcccgctttcatacttacaggattatgtaaagactatgtcttactacaagatgaacactttacaaatccacctgaacgataacggcttcaaacaatacttcgaacatgactggtcaaaaacgtatgccgccttccgcctggaatgtgatacttatccgggactgacggcacgggacggacattatacgaaaaaagaattcgtcgacctgcaaaaattggctgaacaaagctatgtagagatcattccggagattgatatccccgcccactccttggctttcagtcattataaaccggaattgggaagtaaagaatatggcatggatcatttggatttatttaatcccgaggtttatactttcttcgacgctcttttcaaagaatatctggaaggagaagaacctgtattccggggcaacaaagtccatgtgggcaccgacgaatattcaaacgccaaaaaggaagttgtggagaaattccgcgccttcaccgatcactatatccgttatatagaaagcttcggcaagcaagcctgcgtatggggtgcactgacacacgccaaaggagatactcccgtcaaatcggaaaatgtcatcatgaatgcatggtataacggttatgccgacccgaaagaaatgataaagcaaggataccatttaatcagtatcccggacggactggtctacatagtcccccaggcaggatattattatgattatctgaataccaaatcactatacgagaaatggactcctgcacagataggcaaagccgtatttgaagaaaaggacccgaatattttaggaggaatgtttgctgtatggaacgaccatgtgggtaacggcatttccaataaggatattcatcaccgagtttacccggccttgcagacactagccgttaaaatgtggacaggcaaacaagtcacaactccctatgacagtttcaatgaacaacgcaatttactaagcgaagctccgggtgtgaatcaactcggaagaatcggaaaagctcccggcctggtttacgaacaggcagctgttacccccaaccgtactcttccctatcgggaaatcgggtataattatctggtatcttttgatataaaaggagctgatgaagcaaaaggtacagaactgttccgttctcctgacgccgtattctatttatctgatccgataagtggaatgttgggctttgcacgcgacggctatctcaacactttcaactaccgtatcatgcccggcgaacatgcaacagtaggtattagcggagacaaccgcgtcacccgcctgcatataaatggaaaaatcgtagaagaactaaatatacagaaacgcttttataatggtggaaaagattccatgaattacgttcgtacattagttttcccattacaggaaacaggtaacttcaaaagtcagattaccaatctgaaagtctaccgccaataggacggatattgatacagaaaaggctgtcccgtgtttcattccgggacagcctttttataatccagttatgacaaatgtaactgctttcttaccagtattattttatggatactcaataaagaataatcgtatccttctcctgccttgtatttaatccaaaactgatagagattttccgcaataccttcgctaaatcttcatctttacgaatagttcccgtaaacagattatccctattctttttattctcgaaacacactttcgtatgatacttcttattgattaagtttatcagttcaccaagcggcttatccgtaaagttatactcttcttttctccagtcatatccttcaatatccaacgtctcggtttcaatcgtctttgaatcaatatagtaagtgatgcgttgagcaggcttcacctctatggcctcttgccccgtcacctgaaaatctatttttccggtaaagagagtcacctccgctacttcatcatcagactttatattaaattccgtccctttgacttccacaagcgcatctttgaaataaaccctgaaaggactgcctcctgtcatctttttcacctcaaaagacgtttctccctctaagaccactttgcgctctttcaaaaaatcgtcctgatatgaaagcgtacttcccgtagcgagccataccaccgaactatccggaaggacatacgtcatacgcgtatcggccggtcccaagactattgtctctaaagaagctcttgaagtaatcagataccacgtacctacgaccagcaaaagacaagcggcggcagccagaatcctaaaaccccgattatagcctgacaattttttctttgcaggtttgtgattccaacatacatccgtaatgttggtccatatctcctcctcaatttttttgttttcaatagaagtgccaaagaatttatcccactgtctcagtaataaacggcacaccggtccttcatccgctaattttattttttcctccggagtcagtcctttagaaaacatcttctttactatttgtacaaattccttggcattcataatactttatttttttaattgagattcaataggatcgtcatactgagtctgaagctttaccaattcccctttcagtttttcagttatcttttcataaccgggcttcccaaacaaattatgcatttcacgcggatcttttttcaggtcatacagctcccacgcatcaatatcattataaaaatgtatcagcttatagcgttcggtacgcacaccataatgacgtttcaccgcatgttccgccggatattcatagaaatgatagtaaagggacttacgccagtccttaggacgttctcctttcagcaaaggcaacaaagataccccctgaatatcttccggaatatctactcccgccatttctaagaaggtaggtgcatagtctatattctgaaccatttgcgacacttttcctttcttgccatgaggaaaacgggctaacaacggagtacggaatgactcctcgtacataaagcgtttgtcaaaccaaccgtgttctcccatatagaatccctggtcggaagtataaaccaccaatgtattttccagaagccctttttcttcgagatacttcaacacccgtccgatattgcggtcgaccgaacgaatcacactcaaataatcatgcatataacgttgatacttccactccgccagttccttgccttccagtttccgggctttaaaatctttgataatagggtcataataagcatcccaggcagctttttgttgcggattcatacgcttatacatagcgcgtccataaccttccaatccagtttttgtatgaatctcattttctttatccgccattttcaggtcatagacaaggtccatatccttgaatatgttcatctcctgttcggaagcagctatacggccttcatatttatcatagaaattttccggcaatggaaacttcaccttatcaaacgctcccaagtcacaagtgtcgggcatccatgtacggtgcggggctttatgatgcaacaacagacagaacggtttttctttctcccgtttgttctccagccattccagcgccaagtccgtagtgatattggtggcatacccttctatctgcactttcttaccattatctataaaataaggattgtaataatcaccctgaccaatcagaatattccaataatcgaatcccgtgggattagaggtgagatgccatttaccaacaatagcagtctgataacctgccttctgcaacagcttagggaaggtctgctggcttccgtcaaaccgatgcgcattatctataaaaccattcttatggctatgttttcccgtcaacatacacgcacggctgggcccgcttatagagtttgccacaaaactattggtaaagacaactccttcattgccgatacggtcgatattgggtgtctctataaaacggtgatcgtaggcactgatagtctgaaatgagtggtcgtcactcattatatacaaaatattcataggcttctcagacgcccctttactctgagcaaaggagggcaatgttaccaaggcggctacccctgacaaaaaaatgcagtgtttgttgttcatcactataaaattaagttcgttatgtaataaatacattcattaattaagttccccttactgaaaaggaacagttttaattttctgtatcataatttatggaaaaacgtgcagcaaagataaaaataaatatccataaaataagacacttagcaaataatagaaacagaatctgtttcaaaaaacttcaaaacagattctgccttcatcttaccgttaatagcccggattctgcaccatttgcgggttattacttacctgatctaccggaataggcatcaaataattcgccggagtacggaattcacgaatgtgacttgtcatttgtgtatccttgaagaagtcctcatctttggtagcttccacatttaatcctctcggatatacaccaaagtatttttcccccaacttccagcgacgaagatcccagaaattatgagtctccatataaagttcaatcatacgttcctgacgtacaatctgcatcaaacgaccatcggggcctacggaagaataatctgtcaacggctcctttgccttcgcccaggcagtcagtacagggtcaatgccggcacgctctcggattacgttcaatttcttcatgccttcagccacataactagcatcaccatatccgacacaagcctctgcataatccagatacaactcacccaaacgaataataggcaacggatatctcaaggaaggcacgttgtccgacttacgggcagccgatcccggatgaacccctttcttattcagataaccggttggagagtagttatttcctctgttcattttgccactgttgtcttccttcttgtactgtgtcaaccatcttttgcgttgtttacggtcggaacggtccattttatcctgataagtaatacctttggtaccgtcggctactacattctccgtctgacattcgtaaaagccattatggaaagatatccaggcatagaaacgcggctcacgatgatcgttcaatttcaacgttattccctctccgcgtgtatcatcatccaaaatagtagtctgaaaacgattttcatagtcatacgtcgggtcttggtcaatcggaagaccattttcggtatagaatcgttctaccattgtcagagacggaccatatcctcctccaaaagaaagataaggaatggatttattctgtatgctatacatttcttccaagcgggtatttgcccaaagcacctccttagttccgttcttgtccaggtatgtaagacgcagctgtctttggataggatctttcggatacggataggtggctgtaccaatggcatcatcgccaacgtaatataatctgtatccgtgatcttctgcaaagtttattgcttccaaagctgcatcggcagctactttatatttctctttactatatgtttgagacatcaataaggtgccgtcattgttggcaaagtcactgtaatattccgagtttccattgaatagaggagaagcagcataaagcaacaatcgggccctcagcgctttggcagctacactagttgccagtccgtaagaagatcccatacgttccgtaggcaatttctccgatacgattctaaattgttctgatacccagtccacacattcgtcataaggagaacgggctgccatcttgtcataaggtgtattcatatccggtaattcttttaccaagatgataggaccataatgctgcatcaataccgaatgataataagcaatcagaaaatccgcctgattggcgaaatcattaatcttatcatcactcaatcccggaacggacgcaatattcttcttcaacagataacattgccgtatacctttatacatattactgtatgtcgcatccacattgccgatatttcctgaagtatatcctccctgaaaatatagtttaataggttctccgttgaaacagcttactatttcatctcctgcatatccgataaaagtatgcgaactctgataagcaggcataaaggaataacaggaatacagatagttcaacgcagcttgttccgaagcaaatgcatcttcttcattggctgtttcattcggcacaatatccagataatcacatgagcccaagagacagccggcaaatacgaacgataacaaaatattatatatctttttcattttattcaaattagcggttattattaatagtcatctgaaaaccaaagttgaaaacacgttgcgtaggatatttcaaaccattacctcctccttgttccgggtcccagtgcttgaatggcgagaaagtcgccaggttcatgccactgacatagaaacgcatattcttgtatgtataacctatttctgcgttcttcaacttgataaatgcagcgttgcgcagccaatagtcagagcgttgagtgttgtttacactcgtgtccctggtcagacgaggataagtggcgttgatattctgattgtcgggagaccagcgatcgtcagcaatccaagtcaggacattacgcaaactgttgtctccgaacggatgaaaatcactcataaccaatgaaacctttgcaactccctggaagaagaaagagaaatcaagattcttccagcgtatagaagggccgaaaccatatacaatctccggaacggtaggattcttcgcccatacccagtcagaaatatccacgatatcatcatcataaccataaagtttggagatattcacatacttgatatcaccggcactaagatttcctccgatctgctggttagagtttttcacatcatccggatctttgaaaagaccgtcggaaatcataatactaggaatatttgcactctgccctacttttgactggaaagcatatttcggagattcatcgtattttgtaatctcattatgagcatacgtaaatgtccctttgaaactgataaaccagtccttacctattttcttattgaaatctgccgcaaagtcgaagccttgattcttcatggctgccaagtttccgaacacctttgttcctgctgttcccagatattgaggaatcgtacctctctcctgaaatatatcagtacgggtttcgtggaaatagtccattgtcaggttcaatgagttaaacaactgcaaatccaaacctacattgactttcttacccacttcccaagtaacctccggattaccataacgggaatatacaggacctttataagttatatcaccgtccagcccggtagtatatccggtacctgtcaggttgattgtcggcatatacacaaaacgtgccccaccaatattgtcattaccaacaagcccccacgaagcacgaatcttcatgttagagaaaacattcttcaaaggttcaaagaacgcttcctcactgatgttatatcccactgcaatagaagggaagaatccccaacggtgtcctttggcaaaattctcggaaccattgtaacccatattcacttccgccagatatttcccgtcgtaagcatacgaaagacgggcagcaacaccttgtttacgtttgggaagtgcagcaatcaagtcgccactgaataattgagtcaccagttcatcctgattatagataaacatggcattcacatcatgctttccaaatgtacggttgtagtccatgatagcctggaaatagaatcggcggtcgcccgagttggcaacacccggtttcaagtccgtagatacttctccaccgctttcattctgaagtctggtgacaaaagaatacactccattatcatctaccgagaaatcctgtaaatggtatttgttccaacccgcggaagcactgttagtagtacttgaccagttcttgaaagaggccaatgccttaaatctaagtccctcggtaataaaattcagtttctgctcaaactccaatgccgccactaccgtgctccggaaattatcctgatagccggatgcaagctgtgccaccggattctgttgctgtcccggtttcaagcggtcattcacaccccacttgatatgtgtagtaacaccgtcgtcagggaaatagatcggagcttccaccggacttgtattgatagctcccgcaaacagatcgttcatactgatgttgggttgcttcgtttttctcagctgcacattcaagcgcaaagaaagacgtgaatccttacccaaatatgcattaatgttattctgaaatgaataacgcatcacattaatgttattattataggagaaaaagtctttggaacgattcttaatcatacctgtctcgtgattgaccgtgacacttgagaaataatccactcgtttgccgcctccccggatattaacattgaaattctggttaaatgcctgatccttaaaaagctcgtcataccagttgacattcggataagcatacggatttaatccagcacgcgttccggcaatttcttctgccgaatagggagattcggtagagccgccgttcaacaaagattcattgaacaaatccatgtaagtggctccgtcgacaaacttcggcttacttgtcggacttgtgatctgtccttccacacggaaattgataatcggtttatcaatattacgaccggatttagtggtaataatcataacgccattagccccacgggtaccgtacattgccgtagcagtagcgtctttcaaaatagagaagccgtcaatgatttccgggtcaagattatccaaatcaccggaggatatttccactccgtccaatataatcagcggattggttgctccgttcattgtagaaataccgcgaatataaaaatccgatccatccgctcccggttgtccggtacgctgaacagcaataacaccagccaatcgtccggcaaaagaattggaaagagaagccgaaggaacctgcagttccgccgggcggattgcctgtacggaacctaccatactagcctttttttgtccgctgccataagcagtgaccaccacttcttccaactgctttgcatcttccacaagttctacaagaagtaccttgccgttgaccactttcacttccttggtttcatatccgatatatgaaatgacaagcacatctccgggagtggccttaatcgtaaactttccgtccatatcggtaatcactccgctgttcacgtcttttacccgtacagttgctcctaccaccgattctccggacctcgcatctactacacctcctacaatctctacttttttctgctgtgtgcttgctgccttcttttccaatttcaagatgatatcatctcccataattacataactgataccacttccggcaaatacttctttcaacacatccgagatttctccttcacaatccagatttttacccggtaatgcatcaaggtcactcggattgaagaaaaacttaaaattagaactggattcgataatcttaatggcttgtctcaaagttatcgactgtccttttactgtcactctcccttgcgcagcactcaacgtcaaagggaaaaataagattaataacacgataagcctcaaatgccatcgactacacatactttctttcatgattacaatttaaaattaaacaaagtttttcatacacatagattttgcaaaatcaataaattctctagtttataatacaatatactcaaaccggctctttcattttccttaactttacgccaattcgggattcatgcattatatattaaatacatctaacccatttctaccccttactcaaatctgcattttattatttttttttcgaaaagatgtgtttttgaattattcttcatatcttcgctctttgaaatcctcattaaatcataagatgaatgaccaagaagcaatagtattactaaaatcagacagccacgaagcttttgagtacttgtataaagtatatggcggacaagtatataattttagtaaactatatatcaattcatctgaagatattaaagaagtagtacaggaagtgtttgtcaagctatgggaagcgcgttcttttctaagagaagatgagaacttcagaggatttttatttatcgtcacccggaatcttatctttaaccgccagaaaaaaacatttaatgaaaacttctataaactgtctgttttaagtgcttacgagcagtcgaacattgattcctacaatatagaagaagaattgcaggctaaagaattaaacaattatattgacaagattattgaagaacttccaccgaagcaacaggagatatttattttgagcagaaaagaaaacctaagtcataaagagattgccgaattgctgaatatcagcgagcgaacagtagaggttcatatagccagagctatccggcacattaaatcccggctggaatacctgatcgccctcctgggagtaatggacttacttaattgaaataggtcggctaccattcttttatttcttattttgagcaatacggttattgccggcctgcgacttcacaattattccacttccgttcttgctacatttaatacattccttccgcaatttcctttctttcaggtcaaagatcagattcggattaaagtgttgtccgttgatacgggtttcaaaatgcacgtgttcggtggtagcacgaccggtacgaccggtcagaccgataggttgcccggcttttacgacatcaccgctccgaaccagattcttacagttatggctataaatggtttccagcccgttcgcatgacggattactaccaaatttccgtatgcataataaggtttcgacatccgtaccaccccgtcaaaagcagcacgaatcgtatcattagcacaagtcttgatatctgcccctgaatgtcccccacgagtaccataagcagaaatgaccttaccacccggcagagggaaagcatattcatgctccttcaacgagtccaaatgcaggtatatatgattacctttagcaaacaatccgggagtagccacacggatatggtttacctccctgaaagaaaaagaggatttgtcttgtgcgttcgcaatcatcggaaagaataagacgaataatagtatgagaatgcctttcatgtattttttcgttttcaatcaaaatactcccctgattattcaaaaaagataagttcgctgctatctgattctgcatattcgttcagtaatgactgaatcatctcagcagcttctttcaggcctttttttccattataaccattgacgattgctaaaatatgggtagtaccgagattcattttagtccgttcgttgtcactggtaggcgtaccgataccacccgacgcatcacgataaacgggcaatccttcgatattcaacacaccctttccgataccttcaaacggttcccctgctttgccgatacccaattcaagatatgcgccttgtattttatccgcgtcaaaaccaccgatagaatgtcccgtccgaagagagactaagttgatgagatctaccagagtatcaatctggtacagaggaattccgcgcatcaggcgacgacgcaaagcttccgccgacggacggtaacgtccgggatctttaccacaacgtttgtaggcttcgcgggtggcagctatgacaggctgatgtttgatgtcttctatctgtgtagtagtagtcagttcttcggtgaaagcattgatttccttccaaagtccttcgcagtaagctgtattcttcactgcggcatatacggctgctccggcaaagaccggacaagcatctttgatctcctgtgatacttttatttcaaacataacttattataaaccaatcatcggcatcccaacaattacaaatgccgattattacgttctaatcattattcccgacaaaatacggccggagtcaatccccagtctacgcgcagagaaaaaatcatcttgatgaatataggtacagataccggctacttcaatttgcccggcaggaattccggcataaagcaattcactccggttggcttcccacagatcaatatggtgtttgcctgtcttcctcttttttgtagagataatggacatatcaaaaccactttctttgaatgcttcataaacctcatcacctacttcaaatgattcgagtgaaatactcggaccgatacaggccactacgtcagcaccccgggttccgaaattccggctcatgtgttccattacacaactgacaatatgctgcaccgtgcctttccaaccggcgtgaacggcagccaccacttgcagccttctgtcatatagtaacacgggtacacaatccgcagtcgtaacacaaacacaatatcccggcacattggtaatcaaggcatcaatgcctctcaaaagtgttcgtctcacttctaatgactccttaaagaacgattcgtcaacgaccagactcgcactaccatgcttttgctccggaataactaattctttaatttgatgtcccgttatctgaaataacttattctgattacaattcacattgatacatgaatccttggtataaggcgagcaattaaatgagccatatgttccctcactgacacctccatgacgtgttgtaacaaaatgagctacttcggggtataccgtcaatgacttataccccttcagctctttatcttttgtgagtgaaatcatttttcctcccaatcctcttcttcgtattcgtaatcaatgtcctcatcgtcatcatccgcttcctcctcatattcatagatgatgtcttcatcttcacccatgtctttgagttcctgttgcagacgggttacatctttcggacggtgaacaatgtcttctatcttgttgctttccttattcagttcctcccacagaatatctttcaatacggagattcccaaaccggaaacagaagagatgaacacgtgcggaacacccgcgggcaatgtcggttctatctcgtccattagctcctggtcgagcatatcgctctttgtgatagccagcacacgttgtttatccagcatttcgggattaaaagtactcaactcattcagtaggatttcatattccttgcggatatcatcactatccgcaggaaccataaacagcaataatgagtttcgttcgatatggcgcaaaaaacgtaatcccagtcccttaccctgactcgctccttcgataatccccggtatatccgccattacgaatgatttaccgtcacgataggaaacgatgcccaagttcggttcgagcgtagtaaacggatagtcggcaatcttcggtttagcagccgaaatagcggaaagaagcgtagactttcccgcattcggaaaacctaccagaccaacgtctgccaggagcttcagctccatgataactgtcatttcctgcattggctcgcccggctgcgcaaaacgcggcgcctgacgggttgccgtcttgaaatgccagttgccctgaccaccgcgaccgcctctcaacaaaattacttcctgcccgtcttcggtcacgtcacaaaggtattcccccgtttcggcgttatacaccaccgtcccgcagggaacttctattattttatccgcaccgtcttttccaaaactacggttcttgcttcccgattcgccatgacctgccattgcgtgacggtcgaacttcaagtgaagcaatgtccagtaattacgattaccgcgcaagatgatatggcctcctcttccgccatcgcccccgtcgggacctccgttgggacaatatttctcgcgcctcatgtgtgtagagccccttccgcccttacccgagcggcagtaaatctttacgtaatcaacaaaattcgattcagccatacttttctaataatattattataacttgtctattgcttcgcaaatttcagcgaagataccttccatagtacccagaccgttgatatgctggtatttcttttcgttcttgtaccagtcaatcagcggagcagtctgtgaatgatatacatgcagacgttttttgatagtttcttcgttatcgtcagcacggccggagtctttgccacgcttaatcagacgtaccataagttcatcttccggcacctcaaggtcaaccattacagaaacatcctgtcctctctcggccaacatcttctttaatgcttccgcctgtgctattgttctgggaaaaccgtcgaaaattacacctttgctatctttgaagctatcgaatacgcttgccagaatatcaatcatcagttcatccggaatcaactgtccctggtcgatataacctttagcagttttacccagttctgtaccgttcttgatttctgcgcgcaatacatctcctgttgagatgtgattgataccatacttttctacaatacgctcgctctgtgtcccttttccagaacccggagcaccgaaaattacaatgttcaacatcttttttacctaaaaattaatttgtatttgaatttagtctactactgtgtaaatgtcggggtaatttcgcccgaaaccgtcataatccaatccatatcccacgataaagtcgttcggaatttccattgctacatattcaatgttcaggtccaccttcagtttttccggtttcaccaataatgaagcgatgtggatagattcgggattacgcgtacccaatgtttcgagcagtcgctgcatagtcagccccgtgtctacaatatcttccacgataacaaccgtacgtccggcaatgtcctcgttcagtccgattacttctttgataactccggtggaagtcactccctgataagaagccagcttgacaaacgatatttcgcaagggattgtgatgtgtttcagcaagtcggccgtaaacataaacgaaccattcaacacgctgaggaatagtgggttcttatctgccaaatcgcgattgatttcgttcgccacgcgaatcacttctttctgaatatcttgttctttaatggaaacagtgaactgcttgtcttttatctgaatgctatccataaccggttattttaaaaaagttgtcgcaaaaatacaatttttattccactctgtacatcttcttctgcaatttctttgaaagaagaagcagaatcggtgagatagttagcgatgtttctccattaagcagtccacagaatatccctttatgaaataaataaaaaagctatttaacagcctatcggataagaataaatagacaataaaaagaatagccggaaagaaataagagtaatcatattttagacgcaaacacccccactgatccacttcattaaatttttagtcgggtagataataaagcggattcccaccttaaatgtacattggtttccaccttagccaaaagtaaattcaacattctcaatgctgacaaaaagcattccttcccttttcctcagaaagaccttgctttcccttgccaaccagccgatagcaagagctacgtcttcaaacgtcaaacctaactcacggcacaaatcgaacattgacagttcacctttttcatttaagatgcgccatacttttccggcattcaagccaattctagtcttttccataatgcaaactttagaagattaaacaatccgttatctatgatttaatcattgtgagcacaggaaaataatgttatgcacattacctacctacaaagataacatttttctcgaaaaaagcaaataatcagcaccataatactcaattctcctactatctccgacactgactgaagcgcttcttcgtcatccttgtgcgaacaggctatatcttatgtccggtacattcatagagaagttactccccattaaatgtaaacttgctgaaaagtttcacttcatgcattacaatctataatcaaagtttgcgtttatagttcttcgcctgtcaacaggaactttgctacctatacaaaacaactttactttccataaagaagaattttccgacctatctcctgtaactcatctatctatgattaacacgtttttcttcccataacaaacgggaaaagtcagaataatcatgtacatttgtagggcgaaaacttaaaaaaacatcacaatgaaaatatttccaagcagcagtataaagaaactggacgcatataccattgagcacgagccgattgcctcaatagacctcatggaacgtgccgcaaccgcactgacaaaagccataatgaacaggtggagccgggaaactcccgtcaccgtatttgccggaccgggcaacaacggtggagacgccctcgccgtggctcgtatgctatccgaaaaaggatataaaacagaggtatatctctttaacccgaaaggtgaactctccccggactgccagaccaacaaggaactggtggaaatggcagaggaagtgacattccacgaaatcagcacccaattcgtccctcccaccctgacaccggaccatttggttatcgacgggcttttcggttcgggactgaacaaaccgttgagcggaggattcgcagccgttgtgaaatatatcaattcttctccggctatggtagtagctattgacatcccttccggacttatgggagaagaaaatacattcaacgtgaaaaacaacattatccgcgccgacgtaacgttcagcctgcagcttccgaaactcgctttcctttttgctgaaaacaccgaatatgtaggcgaatgggatttattgaatatcggattgagcgaagagggtattgaagagacgaaaacaaactacgagatgctggaactggaagatatacgttcactcatcaaaccacgccaacagtttgcccacaaggggaatttcggtcatgctctcctgattgccggctcgaaaggtatggcgggtgcatcggtattggcagctcgtgcctgtctccgttcgggagtaggactgctgactgtacacgcaccgatatgcaacaacgacattcttcaaacctccgtccccgaagctatggtagaaaccgatgccaatgaaacctgctttgccatacctaccgacacggacgattaccaagccgtcggcatcggccccggactgggaagaagcgaggaaacggaagctgccctgctcgaacagctcgaacattgccagactcccgtagtagtggacgctgacgcactcaacatccttgccaaccaccgccacacactgacacacctgccgaaaggttctatcctcaccccacacccgaaggaactggaacggctgaccggtaagtgtcaggattcatacgaacgactgaccaaagcctgcgaactggctcatgccgccaacgtacatatcatcctgaaaggcgcctattccgccattatcaccccggcaggaaaatgttatttcaacccgaccggaaatccgggaatggcaaccggaggcagtggcgatgtattgaccggagtgatcctagctctgctagcccaaggctatcccgccgaggatgcagctaaaatcggtacttacatccacggactggccggagatttcgcccagaaaaagcaggggatgatcggactgattgccagcgacatcatcacctgtctgcctacggcatggcgacttgtaagcgaataaaagttaagaacttacagttttttcaataacttcattaactttgttttcaaaaccagttaaaaaagaaccgaatatgaaaaagttgattatagcaacgggactactaatggctacttccgcctatgcacaaacagaagtgttgacaggcgttacccgaggaaaagactacggagtggtgtacagccttcccaaaacacagatagaactcgaaataaaagccaacaaagtcagctatacaccgggtgaattcagtaaatacgcagatcgttatctgcgactgaccaacgtatctgccgagcccgacgaatattgggaactgaacagcgtaaaagttaaatcagtaggagtccctaacagcgaaacgacttactttgtcaaactaaaggataaaacagtagcccctctcatggaactgactgaggacggaattgtgaaatcaatcaacgtcccttacagcaagagtaacgagactaaaaaagctgctcccgtcactcccgccaccgtaaaagcgaatcctcgtgatttccttaccgaagaaatcctaatggccagctccaccgccaaaatggccgaactggtagccaaagagatctataatatccgcgaaagcaaaaatgcccttttacgcggccaagcggacaacactccttcggacggcgcccaactcaaaatcatgctcgacaatctgaacgcacaggaagacgccatgaccaagatgttctcgggcacacgtgacaaagaggaaaagacatttacgatccgacttacaccggataaggaactgaataacgaagttgctttccgtttctctaaaaagctgggggtagttgccaacaacgacctggccggcactcctttctatatcactctgaaagacttgaaaacagtcaaaatgccacaagacgacgggaagaagaaaaaagaaccggaaggaattgcctacaacgtccccggacaagcgcaaatcacgctgaccgacggcaaaaagaaactgtatgaaggagaagtacctgtaacgcaattcggcattatcgaatacttggctccggtattgttcaacaagaactcaactatcaaggtgtatttcgacccgaataccggcggacttcttaaagtagaccgggaagaagggaaataatgaaactctaaaaagaaaagaatatgggcggtgaaggacacatgctcgacatgatacgtcggcttagcgaaggaagagaagcctcccgcctgcgtcgcgagcgaaacaacgagaagctaaaacatttaaaccgtagcaacgaacattacccgttgcccaataccacgtcggaagaaatggaacgtatcatccgtgattccgagaagaaaaaggaacgggacaacagctacttcgtatgggggacactgattatcatgggcgtcctgattgcaagtgccgttatactatgggctatctttattaaataatttattccccgcagagtaacacagagccttttaatcttaccgtaaagagaggattcagtgagagacattgtgttactctgtggggaaatgaaattttataaaaccgtccttctgtaactgataaagataagtagatacacgtgactcgtagcctgcttcattctgaaaatggtctgcgagtttttctatgatttcacgcaccgtccgtttcccgtcaatcagttcccatacaaccgttccgtgttcttccaaatgcacatgaagctccttcgacatccccttcggaacaagaaagcgttgcatccacgtatatttaaaacgagggaaggagagcacaatcgtctccccttccctttcaacggtaatatgttcactgcgacagggaattacatccaacaggttgattttctctttcgctgccatactttgatctccttatttcaagaatattatactgagtctttaatattataccgattcttttttaatattagcttcttccagcccataaccttttttcctgttctctgccttcaacatcaaagatacaatcaacgcaagtacaccgaagacagcaaaaatagccataggtaacgtgtaatcatacgtctgtgcaccgtctaccaccggccccttgcaataagagttcagcacccaaccgatcagcaaaggcacacccatcaatccccagttctgtacccagaaaatcaatgcataagccgtacccaactgtttctcaggaataatcttcggaacggaaggccacatagctgaaggaaccaatgagaaagcgaagcctaacacaatcataatgatcgtggcaaaccaccacacattcaggataggaagtgcaaacatagtatgcacgaatatcagcatcactgcaccaatagtcatcaacgtggcacctttgccgatacggtcatacagagaaccgaacaacggagtcaggatgatcgcaccgatcggtaacaatcccggaatcgtccccgccaatttcgggtctacattatatttctgtaccattaagtccgccgcatacttgataaacggaaatacagccgaatagaataatacgcacagcaatgcaatcagccagaaccccttgttagtaacgatatatacgatatctttcatacggaaaggttcttcgggttcaagcccttgtgcgtcaagtgaagcatccaacttcttatcatagaatgtgtaaataaagaaagcaatcgtacctacacaaagcataaccaagcagaaaagaatcggcgcggggatattggtatgaaaagcacctgcctcgtcagtagatccgaagaagtcagccaaaggtacagtcagcaccattgccagagttgtaccgatacgtgccgttgccatttcaagtcccatagccaacgccatttccttgcctttaaaccatttcacaataatcttagagacggtaataccagcaatttccacaccaacaccaaagatagcatatcccaatgctgccaatgctacctgcatcttgaatccgaaaagcagggcaccttccgggaaagtggtagagacagcataatatttcagtccacaaccgaacaccattaacagacaggcgcccattccagtaaagcgtactcccattttatccaggataataccgccgaaaatcaacatcagcaagaatacattgaaccacccgtaagcgctggtaaagaatccgtaatccaaactatcccagagtagttctttctcaagcataggtttcagcggggacataacgtccgtgaggaagtagccgcataacatggtaaaagcgaccaatgctagaacgctccaacgcaacaccttggagtcattcaatttctgttttaattgttctgtcattgttatatttaaatagtagttaataattttattttttacgaccaacaaagatagttaaatctccattgtatacctcacaaagagatttgtttttagaaaaaaagttaggcgcggattacatgaattgcacggattcattaacaaatccgtgtaatccgtgtaatctgcgcccaaatatagagaaatacagaaaaccttctgccccctcttaaatggtttcacccaatccctctctgcaatccgaatggattattcagcagcaggagccggagtttcagccggtgccggagtttctgttgcaggtgcagactctgccggagcagtagcatctgtttgcggtgcagcagtaccagcaggcaagttatacgggttagtctgttgttctttctgagcctgttccaacactgcatctttaacagcagaagaatgaggaacgacataagcggtagcaatactcatgataaccatgaagatagctaagccccaagttgctttttccagaaaatcggtagttttgcgtacgcccataatagcgttggatgaagagaatccggaagcaagtccgcctccttttgagttctgaatcagcacgataaagcacatcaacagggctgcaataaccattaagataacgaataataagtacatttttagttattttgaattagcgttaataatcaatttctccaaaaatctgatttggtctgcaaagtaagcatttttttttggatatttcaaacttaattttttaattatttcaagagctttcgaatatcgttgttgtttaacatagattttggctaaagtttcggtaaaacagctatcatcttcttcctctgccgcactcacttcttccgaaggagtaacagagatttccgcttcctcttttaaaggtttcagacagagaggagcctcactttcgctcttttcaataaaatcgtctatcagttcgtatcctttcaacttcggagcgacttcttccgattcggcagcagtcgtattgtcttccaacagataagttgtatagtccattgaatagtcgaaagttgtctgaccggccacctcctccggcaccgtagacagaaaagcgtcaatcaacgccagggtgcggtctaccgaaggctcgtttttcagcacttccgtaaggggcactcctttcttacgggactggacggcaaaccggtcaccttcgatcaactgaaacagtttccggcgatcggcaatgtacagaaccgctttccgcagttccgcgccaaaattaatatcatggagaatatataggttctttagatacaacaggcgaagcgactgaaaatacggataccgcgcgagcatattgcgcagctcatacaaagtatccctatccagcgtttcagggtgctgaatccattgttgaaagttaacagaagtcattaaaattaccagtttgctacagttgcattaaatatttggtcggttatctctttagtcatttcagcaattagtccgtcttgtacagccgtcagcaactgactggaatcataggtacggaaagctgaaaactgttgttcgaagtcttcggcgtggtttgtgttgttgacaaagcgtacattcaccgtaatggtcagtttcgtctccgaagaataaccgtcggcggatacagcctggttgtattggttgtagcctgtaatttctccgtcgatctgcaaatccgcgttctgattcggcttcagcagttggagccgtgtctgacggataaagatatctttcagatcctcattaaacttcgttgccaacggtgcatacacatactccgacttaatagggaagtcggcaatcgaaatggttttcaccttatcataattgatagacgaaccattaaacttataggaaacagtacacgcaatgactaccaacggtaatgcaagcagtagcgcaacgcgtggcgttatctttttaatccagttcatattcttttatttttctataaagcgtacgttcggaaatcttcagatcccgggcggcacctttccgttttccatgatgtttctccagtgctttacgtatcatttccttttcaacttcatccagtgccaagttttcttctacatattcttccgtatcctgaatatcatcatcgtcgtctttcggacagacagttgcctgctgcatcggatgaataatggcaggcaccgaaggctggtttgccgttgtcactaccggagtagcgacgacttgccctacttgtcccatttgtgccacctgccctgcacgttcagccatcatgttgtgcaccatcttcctcagttcggccacttcctgacgcatatcgaacagaacggaataaagaatttcccgttcgctctcaaaacttttactctcccgtgttcccagcaatgccggcagacgttgtacattctgtgcgggaagataggtttgcagaatagctgccgtaatctccctgttcgtctcgataatagatatctgctcggtgatattcttcaactggcgcacgtttccgggccacggataagcaagaagttctttcttcgcatcctccgtcaactgaatggccggcatccggtactttgccgcaaagtccgccgcaaatttacggaacaacagaagcacatcgtctccccgctcacgcaaaggagggatctgaataggcaccgtattcaaacgataatataaatcttcacgaaaacgtccttccgcaatagcttgcgtaagattgacattcgtagctgcaacaatacgcacatccgtcttttgtactttcgacgaacctactttgataaactcgccactctccagcacacggagcagacgtgcctgtgtaggcaacggcaactcccctacttcatccaggaaaatcgtaccgccgtccgcttcaccgaaatatcctttccgttcaccaatcgcaccggtaaatgctcctttctcatggccgaacaattccgagtcgatcgtcccttcggggatcgctccacagttgacagcgatatactgtccgtgcttcctccggctgtattgatgaatgatttgcggaaaactttcctttccaactccgctttctccggtaatcagcacagacaaatcggtaggagctacctgaatggcaacatctatggcgcgcaacaatgcctcggtatttccgataataccgaaacgctgcttcacttgttgtatctccgtttttgtcattacttcctattaatcttcgtctactgtatccagctttagtttgtcactatcatcccgtttctcgtaatactgtttccgcaacggatttgcatgggctactttctcccgttgacgattacggaacacatcaatggcaacataaactgcctgacggaacgagtcctcgctcgccagtcccttgcctgcgatgtcataagccgtaccatgtgccggagaagtacgcactaccggcagtcctgccgtatagtttactccgtcatccatagccaacgccttgaacggagccagcccctggtcgtggtacatcgccaatattccgtcgaaatgcgtataattgcccgatcccataaagccgtcggcagcataaggtccgtaacaaagaatccccttttcctccatttccttcatggcagggataatcacttcctgttcttccgtacccagcaaaccgccgtctccggcatgaggattgagagacaacaccgcaatacgcggagcaccgatgccgaaatcctgcttcaggcaatgatgaaagatcatcagcttttcctgaatcagttccttcgtaatcgtagtcgcaatctctctgacagggatatgcgtcgtcactagagccacacgaaaatcattcttcatcagaatcatcaacgatttgtttccgttgcccaaacgttcttcgatatactccgtatgtccggggaaagaaaattcttccgactggattgtatgtttgttaatcggagctgtcacaattacgtcaatcagcccctcacgatagtcttcaatagcccgttccaaagcgcccaatgcggccttaccggcttcggggtcaggtttggaaaactcaactttcacttcatcatccgtacagttcactacgctcaagcggttgcatcccgcttcggaagccgtattgataatactgaagttagtctgcacatccaaagccttgcggtgataagcagcgactttcggtgaaccgtagataataggagtacataattccagcatggtaggatccgagaatgtctttaaaatcacctcatagcctaccccgttaatgtctccctgggtgatgccgattcttattttattatcttccatgtttttatttattagtttgttccgcttccttggctgctcctcccaatgggatctggttttgctgaacctcattcggaagtttcagtgtataaagagatgcctccatttggcgcactaggttacgtttcattttatcaggtgaataaacaaatatttctgctgtgataattcgttggtttttctcatccagacgcgtgtgagacacatacgggccacccatgaagtcccccttcatgcgccataatccgcgtgcttccattgtgtaactgttctgtacattgatcggacgtacatcggtcagtaaagaatccgttgacatataaaccccttccttgaatcccggaatgttcgccttcatcacagagtcacgcttatgcacaaaatattctttggtgaacgtatctttatcggtataaggataagaatacatcacgaagttacggtcggcagtacctgtattggtggaagcccagaagaaatcttttccggtctttgaattagccagttcggcaggcaaccagatatcgcaaccaaataagctatccactttctgtgagataaaattgctgtgcttttcttccagcatggaaatctgacgattcatttccgcacgggtgaagaagtcaacaatagtctgcttattctcttccacaaacttttggaattcttcttcattcggagcctgaatggtcaatatcatttgcggattcgcatacacatccttcgcatatttgaaagaagctttcgtataaatgtcctttatatctacgataatgatattgcggatcaacttcaacgttgaatcataatctttcggtgaagtatacataatacggaaagaaggttccgactgcggcaaccccggcatatccgaatcgagcacatcatgcaaggcccttcctgccgcacgatcccaaacgccgtgatctactactaccaaaagttcgtatgcacgcccactagaagtgtgattccctttcagaccacaagaagcaaaaacgaaggctatcaaagccatgcttaaataagaaaagtactttttcatgatgttcgatttttatattagctctttttatttttctcctgtttcgcagtcgacaacatgccgcaggctgcaaaaatatcttctccgcgcgaagaacggattgtagtaaaaagcccgtgcgtggtcaaatagtcacggaaacgggtcattgtatccatatctgccccttcaagatcaactcccggaatgtcatggaaccggatcagatttatcctgcaatccaatccacgcaacagtttcagcaactccttggcatagacttgcgaatcgttgagtcccttaaaaacaatatattcaaatgaaagtcggcgctgtttgctaaaatcatagttttttaacagttccaccatttcggtaatcgaatagcctttttccgccggcatcagttcggaacgctgcaccgccaacggcgaatggaggctgattgccaaatgacaatcactttcttcaataaaacgtttcagccctttccgcaatccgacagtggagagggtgatacgcttcggactccatgcataaccgtaatcagccgtcattatctccaatgcctgcaatacttcatccaggttatcgagcggttcgcccatgcccatcatcacgacatttgtcaacttgtcccgttccggcaacgaatgaatctgattgataatctgactggcggtcaggttggccttataaccttgttttccggtcatgcagaacttgcagttcatcttgcagcctacttgtgaagatacacacaaagtcgcccggtcatcatccgggatatatacggattctacaaagtggttctcacctactttatacaaatacttcaccgtaccgtccacagagcgcatttcatctaccggcgcctctgctcccacctcatagttctgcttgagcaactcccgatacttcaacgacaaatttgtcatttcatcaatcgaggccaccttcttatcgtagagccacgatgcaatctgcttggcggcaaagccgggcattcccagtcttttcgccagcgattgaagctccacaagagtcattcctaaaagaggatatttagacattattccttctgttcatggtttatatttgcaaatgtaaggaaataaagtcgatttccgtacagcgagaatgtaaaagttaacaaaaaaggtcgttcccgaaagaggaacgaccttttgcagttatcgtttttacgattaagtcttagaagaacaggtaacgtgtatcttttacgtttcctttcagatacaagtcattcatcagacggcttgcgaagcgtgcgtgcatattagtcaacgtagcttcttcatcttttgcgttgaatgtatcgttcagtttgtccttgccatatacttgcagaacaaatacgccggcattacctttgatcggagcgctcaatttatttacttcagcaacagaagcataagcgccaaccaacggttcgctactacgcaaagcagatacataagccggagcagcaaacgttaccattttcaaagaatcgctgacagcgttcggcatagccttgtactggtcgagtgaggttgcgttggcagccttcatgtcagccataatcttttcagctttcttatctttcacgatctcagctctcaactgttcctgtacggctttcaatggacggtatccttccggcttgatgtttaccagaccaacgaccatcatgtgatcgctttcgccacattcatacaagcctgatacttcacccggttttgctttatcgaatgcccatctcaacgcttcttttgtacctctcacaccaccgataccatgttcggagctatacaaatcagctctgtcaagcaatttgtatccggcttcttcggcgttagccaccattttctcaacagaaggattggcagcgataaactggctgaagtcattgtaagcacggttgtatgtttccttgctgaattcaacttcacgcttcaccacagctactttatatttatccttcactgctttcttgttagtcacctgaagaataacgttagcttgacccaacggcaagtttaccagttcgttcacacctgtgctgttaatagcagaaataaatttcaagttgtcaccgtcaatttgtgcaccttcgtactgtgcagcagtcatccagttggaatcaccggtctgaccgtatttcttagcaagctctacgaagttagcaccacctttgatagcattgtagatactgtcggccagagttttcgtcttagctgcatctgctgcatatacctgaatctgacggaactcaacagaatcggcagccgcagtcttggctacaattttgaatgagttgatcgtattatcgccaccattatagtaaggaccataaacagaaccaacagaagcagagtccaaacgtgcaactacatccgacgggaaagcagtcttgttgtagaacaagtctacataaggagcttccgaaccaaccgaacgaatgaaagaagtataatcatccgttgtagtagccaactgttcagtagcttcgtccacttccttctggatagcggcgcggtcggctgcactggcagttacctgtacgtcgatgtatttgatatcacgagtttcctggtattgcttgaactgttcttttttcttgttatacaagtctttcagttccgattccttcactacgattgtagaatctaccacagaagaataaggaacggcagccagcaacatattgtattggtttactcttgcgtcgaaagcatcctgtgcttccaccgggttagagataagcgctttggataccaatgcctgatacttttcagccagacggctctgaatcagagttttctgaatgaacgaccaatatttatacatattgttgtactgttcagcatactgtgccggcatttgcgattcgttcattttggcatattctaccaggaacttgttcaacatatccttgtcgaagtttccggtttgcggattctggaaaggagtctgtctcaacaaaggatgaacgccagctttcaggatatcctgaatttcagcagtagaaacagtcagtcccagtgcttcagcttctttttcaatcagtttattgttaacgtaggaacgccatacttcatcgcgtacctgactggtttgttcgtcattcaaggcggtcactccacgcatgagtttcaccacttcggtatattcttctaccaagttctgatactcctgagcggaaagagcgtctccgttcacctcaccaacgtcatgtgcctggtgcggctgcatcaccttccatgcatcacccgcaatgaaagcaaacagcgccaagccgataacaatcaccaatagaggtcctttcgacctaatgttttgtaatgttgccattttgattaatacgatttatgtttattattatttcttctaattgtcgttttagcgcacgaagatacaaaaaatgctaatatgcttctatttattggctaaaaatttctcggtattcgtcattattccatgacttttaggcgaaccagttctattttcgtcgccgtcaccttgattatcttgaactgataacgtcctacccgaatcacttcatgcagttttgggaaactctgatattgattcagaatcagtcctcccactgtcagatattcgtcggattcaggcaagtcgagaccgaacgtttcgttgactttctcaatctccagacggccggacaatacatattcatgttcgtctatctgcttgctgatataggaagtgttatcatgctcgtcttctatatcaccgaagatttcttctaccagatcttccaatgacacaataccggacgttccgccaaactcgtccaccactaccgcaattgtctttttctgttgcatgaacagtttcatcagcttattggcggacattgtttcggggacaatcggcacttgcttcacattctcgtgccagttggtcggtgcgcgaaacatctccgaagagtggatgtaaccgaccacattgtcaatattaccgtcatatacgataatcttggagatacccgactctataaaacggcttttcagttcatccagcgaagttgtgagatcaaccgccaccacctcagtacggggaacaatacaatcgcgtattttaatattcgagaagtcaagtgcgttctggaagattttcacttccgtatccagttcctcctcattctcggcattatcaatgctgctctgcacaaaataatcaagatccacctttccgaaagctttgtcggacgcatccttgtttaccttcatgccgaaaatgcgcaggaagatgcaagacaaaccggaagacaacttggatataggatataaaacaacgtaacaaataaaaagtggaacggcgaaaacgttcaataccatattgggattgatcttgaacaatgttttcggcaggaactctccggtcaccaaaataatcagggtagaaatgacagtctgtgccaacaccattaggaagtgattgtcaataaagccggccagcagattttcaccaatgatctgagccatcaggataccatagataaccagtgcgatattgttacccaccaacatggtagagataaactcgttcgggttcttgaaaaagatagaaaggatgcgggaagtaatgccccctttgcgttccatttcaaaacgcagtttgtctaccgagacaaatgcaatctccattcccgaaaagaaagcggagaaaagcatggtgattattagagagatataaatattcatagcttatttcacagaatcttttttcacagagtccggcagggcttttgtttccggttgtggcggagcagtcgcctcgtcgtcgacgtagaatataccttcaatattatgaatcgtataaacggtcatttgctgattggaatcgaacccatgcccggtgataatccggtccggttgctggatacgaataaacttgtcggaatacactttctgcgtagcttcattccagtaaagcagttccgtattgaaacgctctcctttccggttttgtatatccacgtttcctatcagtttccagagtctttccttgtcatagtagtaggcagtatccgccttgatactggcttctatatgaaagatcgaatcgaactgttcaagatacactcctttttcaaatgcccaataagacggcttcttgcggtcgaaaaccagccactcttccgtattcacccggtagcgggtcactcccgaatcggatataagggttgtcactccggatgtctgcatcactgccatggagtcacgttctgtaatagcatcccccgttattttctttttgccaccacaggagggaaataaaagaagcataacaattgtccctaagacaattgttatgctcatgcttttatgcaacaaacggttctttcgttttcgcaacatacgtttatctaatcgttgtagactctccgatccagccaccgatagtaatacggtcgccagccttgtaacccaacataaacaggtcttttgcttgcggagtgtgtgcagaatatctgccgatcaatttgtttgcttcttcagctacactcgggtctacttgttttgcgcgttgcaatttgtcaattataacaaagtaagtacacttattcagtgcagactcgtcactccagttaggactcattgcataaaggttggcaatcaagatatacggagcgccataattttcattgagaccgatagctttctgacagtaagttcttgcctgtgacaatttcttagcagaagccaacacagcagcagcagcgtatgctttttccgctttctttatattgtcagtttccaagttgatagcttcatcaaagaatttcactgcactgtcgatatcacctttcttgaatgcctgatatgcacatccggtagcagcctctgctgtcggttccattttataagcatagaaagatgcctgcaaataagcttcactttccgtacatttcatcattttcatgatgtcgattactttcttcaaataagcgaggtcagtctgattagcttctactttcgggccataaattccttgcagtgattcacaatcagcagtaccactgtttacaaacaaggcaaccaagttatctttgatacccagcagacctttcttctttgcttcattagtttcagcagcaatggcagcatcagcatattcggaagcagccagataatcctgaataaattgttccttatgagcaggatcagctttcagtttatccaaagacatctgcaggaaatagaaaatagtagctccggcagactcgccttttacagcattaaccgattggctcagccattgataagcctgattcacatccagtttcggagccaaggcgatatagtctacagccttgatacccaaagcttcatcagcagaagataccttcgtacctttagccaggaattcatcagtgtatttgatacgcaagtcatgcgtattcatcagttcattaaaatatttctgatattccggattatttctgtccttaatctgtgccattaagcctttcagaattttatatccgtcagtaaaagtgtagaaacggagtgtcggacagttttccaacacagctttccaaggagtatacgcatctttaaagttacctgcacgcacagcttcatgcgagatactactgtttgaattacagttagtcgcatcctgtgctaccacagtagtcgcccctgccgaaaggaacaacatagctacaagcgttttaattttcattgtatctaaattttagttgttagtataatattatagtcgtctattctcttctctttttaattcttacattactctactctacgcttgaagaaccaacgttcgttgaacgtcaatccgatacttacgcggaagatattttcgttcacaaaagtcgcttcttgtccactgatacgaacaaactgtccgctgatactgaggatagagcgtgaacggggaacaggcagaccgaaaccggctgttacaccatattcgcgggtagccttcttgccgttgatcttataatacggggtcgtataataagctcccaaacgatattttatgtgagcaagataagaacgtcccagcaagttagggatatattccgcacccacagatattttagaacggtcgcaataagcataagtttcatcaaaatcagcgcgtatggattcatctgttgtccttacaccaaagtctgctttcgaccattgttgcaaactgtaatccactccaattgtcaggcgtttgtcatagttataggtaaatccgacaccatacgtattagggagtgccaatgtagcatccggcgccacgctagttgaagtttcaaccgtacctgtactattagagaccaactgtgttgtcacatcataatcattccccagttttatttttggagaatatacaacaccaagcgtcactgaatgtttcttatctatatcctttgtatactgtgctccaaagtccagcttataagatgatacagatgcagtcgcctgttgcacaaaattataagccccggatacattcggataataaatagtccgcgaacgggttatatccccccagaaataagaagcatttacacccactgaaagatctttgaataccttcacacccaatccgacatatagttggtgtaagcctccgtcgcctgtataatttctggcataagctgtcgtattaccagttgcgggatctgtcgcagtctgagtatccgacaccgtatatcccacattggagaacggcagcaaaccgatactcatcgctagtctcctatgtaaccggaattgcattgccagatagtcgaaactagagtttttggcgttcagcttcacgccaccgccactaatattcatattttgaagactgacgcccccttcaaagaggaaagtcaacgagtcaatggctgtatacgaagcaggattcaacggattgatctgcgctccgtcccggagtccgaaagcaattcctcccattgccttactgtttccgaagttctggtcagacaagtcgccatagccatatcgtgtataaggagagtttgtattattttgagcgattgccattccggtaaccattgtgagcaatagcgcccaaagcgtgtgtttaaatcctaccattattatagtttaaaattctatttaatcctttcaacactaaaaatctatctgcaaagatgatactttttacgctgctatcaaaagaaaaatcatctccgcccgttaaaaaaaccaaaagttcaggatatttatgcttcatagactcaatataacctgaaatttcgtattccatacctttcaacaccccggcgcgtatagccgtttcggtatcccgccccatggggagtttgcgcccgttggagtcaataagaggcaagcgtccggtaaactggttgagtgccttgaaacgcatctgcataccgggagaaatattaccaccatgatactgtcctttcgagtctataaactcgtaagtaatgcaagttcccgcatcaatcaccaatatatctctacgaggatattgctcattcgctcccaccacagcagccattcggtcgtatcccagcgtttcgggagtttcgtacaggttggtgaccggaagcggagtcttcgaatcgagccacagcaaagggaaaggcaaggcgaccaaagccgcaagcacccgttcgcttaaatcaatcacggtagctacaattccctgctcaaccgggtatttggcacaaagagcttccaggcaatccaatgactgattggactcggtcagcacttccaccatttccccaccgtcaaagagggcaaccttcgcagcggtatttcctatgtcgataattaaattcaatgcattcttatcttttagcgggcgcaaaggtaaagtaaaaaaagagaaatcgaaacatctgagagaaattatcttcttttttggttcttcttctgttctctctctcaaaaaagtgtgtcgggcgaactatataatatagaataatatatatttttatttatatatgcacggttagtggcacgcctccatttttcagcagaagataaatcactaattcacaatcaattatacatgcaaaaggggtagcacggttagtggcacgcttttacgtgtataattccggtaaaacagaggctctatttcacccaaatgaaggctctatttaccccaaacagaggctctattttgataaaacagagcctctgtttcacgaatccaacaattctttgtatattcgctgccaaaataaaacgaacctactgatgaaacggtcttttttatatgtaatcttctctcttttcctgttgctcctgcccattggacaaacaactgccaacagcaatgactctatccgtcttagcctgctgacttgtgctcccggagaagtgatatacaccctgttcggacacactgccattcgttacgaaaatccctcacaagggattgacgtcgtattcaattacggcttattcagctttgacatccctaacttcgctctccgcttctcactcggagaaacggactaccggctgggagtgatcgactaccctcattttgcaggagaatatgcctatttcggacgcagcgtatggcaacagacacttaacctgaacaacgaagaaaaggccgaactaatccgcctgttacaagaaaattaccgccccgaaaaccgggtataccgttataatttcttttacgataattgtgccacccgtccccgcgacaagatagaagaaagtattgcaggcaaagtgatttatcccgtagaaccgcaagacggttcacgtaccttccgcgagatcgtccaccaatattgcaaaggacatccgtgggcacgtttcggcattgatctatgtatcggaagcgaagccgatcggcctatcacgcagcgacagatgatgtttgccccgttctatctaatggatgcatttgccggcgcacaaattaccggtgattccattcaacgcccgcttgtaacggacagcgaactgattgtggatgccactcccgaagaagatgaaagcttttggatacccactccgctgcaatccgctcttctcctctttatacttaccgccgccgctaccatttacggcatccgccgacggacaggactctggggagtcgacctcatattgttcggtacggcaggtatcgcaggatgtatccttgcgttcctggccctcttctccgaacacccggctgtcagctccaatttcctgttatttgtctttcatccgggccagcttcttttccttccttacatcatatattgtgtccgaaaagggaagaaatgttggtatttgaccttaaatcttattattttaacactttttatagtgctttttccggtaattccgcaaagatttgactttgctgttgtacctttggcactctgtttgctgatacgttcagtgagcaatctaattgtgacatctaaaaagaaataatgaaaggactactaacttcccttatcaccgtactgaccttcaccgggctgcaagcccagtcgctacctgccgcccctaaattagtggtgggactgacgatcgaccaattacgtacggactatctggaagcattttcgtcactttacggcgagaagggcttcaaacgtctttggaaagagggaagagtgttccataacgccgaatatactttcagcggtgtagaccgcgcttccgccatagctgccatttatagcggtacgacgccctccatgaacggaattatctccaaacgctggatggacgccgccaccctccgccccgtcaacagcacggacgacacggcatttatgggatattacaccgatcagacggtcgcccccaccaaattgctgacttccaccattgccgacgagcttaaaatagctacacaaggtaagggacttgtatacgccattgcccccaactgcgacgccgccatttttgccgccggacatgccggaaacggtgctttctggctcaatcccaataccggaaaatggagcgggacaacctactacggagaatttccctggtgggcaagtcaatacaacgaccgccaggctgtcgatttccgtatcgccggcatgacatgggaaccggttttcccgcgggggatgtacactttcctgccagattggcgggatatgcttttcaaatataaatttgacgacgaccgcaacaacaagttccgacggttcatcgccagtccctttgtgaacgatgaagtcaatgcactcgccgaagaagcgctcaacaaaagttctatcggtatggacgatattactgacttattggcactgacttattatgcgggcaactacgcacataaatccgtacaggaatgtgctatggaaatacaagatacatacgtacgtctcgaccgcagtatcgccaacctgctcgatgtgctcgacaagaaggtaggactacaaaacgtgcttcttttcgtcacctcgaccggttatacggacagcgaatcgcccgattcgggattatacaaaatccccggcggagagttttatctcaaccgctgcgccgccttgctgaatatgtacctcatggctacatacggtgagggaaagtacgttgaaacccaccacaaccagcaaatctatctgaaccataaattactggaaaagaaagaactgaacttgacggaaatacagcagaagtccgccgaattcctgatgcagttcagcggagtgaacgaggcatattccgccaaccggcttctactgggttcatggactccggagatctataaaatacgcaacggttaccaccgcaaacgttcgggagacctcgtaatcgacgtcctccccgggtggacaatcgtcaacgagaatggcggcgaaaacaaagtggtacgccattcttatatcccttcaccattgattttcatgggacattccgtgaaaccggccgttatccagacacctgtaacgatagaccatatcgcgcctacactggcacattttatgcgcatccgggctcccaacgcctgcacatctgctcctattatcggcctgcggtaaaagaaacctcacaaaaacagggcgcaaaacataaataaatcagcattttaatgtaactttgcgcaaactattttaattcgataaataataaacatacttatacaaatgggattcaatgaatttttaagctcgattttcggaaacaaatccacgcgagacatgaaagaaatcaagccctgggtggagaaaatcaaagctgcttacccggagattgagaaactggacaacgacgcactccgtgccaaaacggaagaactcaaaaaatatatccatgagtcggctaccgccgaacgtgcgaaagtggaagaactgaaagcgagtatcgaaagcctggaactggaagaccgcgaagaagtctttgcacaaatcgacaagatagaaaaagaaattctggataaatacgaaaaagcactggacgaagtactgcccgttgctttctcaatcgtcaaggctactgcaaaacgtttcacggaaaatgaagaaatcgtagttaccgccactgatttcgaccgccaactggctgctacaaaagactttgtacgcatcgagggcgataaggccatttatcagaatcactggatagccggtggtaacgatacggtctggaacatggtacactacgatgtacagttgttcggtggtgtcgttctgcacaaaggcaagattgcggaaatggcaaccggtgaaggtaagacattggtggctaccctccccgtattcctgaatgcactgaccggaaacggtgtgcacgtggttaccgtgaatgattatctggcaaaacgtgactccgaatggatgggccctctttatatgttccacggtttgagcgtagattgcatcgaccgtcaccagccgaactccgacgcacgccgccaggcatatctggcagacatcacgttcggtaccaacaacgaattcggtttcgactacctgcgtgacaatatggcgatcagcccgaaagaccttgtacagcgtcagcacaactacgctatcgtcgatgaggtcgactccgtattgatcgatgacgcccgtactccactgattatctccggtcccgtgccgaaaggtgacgaccaactgttcgagcagctccgtccgctagtagagcgtctggtagaagcacagaaagtattggcaaccaagtacttgtctgaagcaaaaaaactgatcgcatccaacgataagaaagaagtggaagaaggattcctcgccctgtaccgcagccacaaatgtttgccgaagaacaaagcattgattaagttcctgagtgaacagggcattaaagccggtatgctgaagacggaagaaatctacatggagcagaacaacaagcgtatgcacgaagtgacggaaccgttgtacttcgtcattgatgaaaagctgaacagtgtagacctgaccgataaaggtatcgacctgatcaccggtaactccgaagacccgacactattcgttcttccggacattgccgcagaactttcggaattggagaatatgaacctgaccaacgaacagttgttggagaaaaaggacgaactgcttacaaactacgctattaaatcggaacgtgtacatactatcaaccaattgttgaaggcttacaccatgttcgagaaagacgacgaatacgtagtgatcgacggacaggtgaagattgtagacgaacagaccggacgtatcatggaaggccgccgttactctgacggattgcaccaggctatcgaagccaaagaaggcgtgaaagtggaagctgccacacagacctttgctacgattactctgcaaaactacttccgtatgtatcacaagctatccggtatgaccggtacagccgaaacggaagccggcgaactctgggacatctacaaactggatgtggtagtgatcccgaccaaccgcccgattgcccgtaaagatatgaacgaccgcgtctacaagacgaaacgtgaaaaatataaagccgtaatcgaagaaatcgaacaactggtgaacgccggacgcccggtattggtaggtactacttcggtagaaatctccgaaatgctgagcaagatgttgaccatgcgcaagatcgaacacaaggtgctgaatgcgaagttacaccagaaagaagctgatattgttgctactgccggtttgagcggaacagttaccattgccaccaacatggccggtcgtggtaccgacatcaaactaagcccggaagtgaaagccgcaggcggtttggcaatcatcggtacggagcgccacgaatcccgccgtgtagaccgccagttgcgtggtcgtgcaggacgtcagggtgacccgggttcttctgtattcttcgtgtcactggaagacgacttgatgcgtctgttctcctccgaccgcatcgccagcgtaatggacaggctcggtttccaggaaggtgaaatgattgagcacaagatgatttccaactctatcgaacgtgcacagaagaaggtagaagaaaacaacttcggtatccgtaaacgcctgttggaatatgacgacgtgatgaacaagcaacgtacggttgtctatacgaaacgccgccatgctttaatgggcgaacgtatcggtatggatattgtgaacatgatttgggaccgttgcgccaacgctatcgagaacaacgactacgaaggttgccaaatggaactgcttcagacgttggctatggaaactccgttcaccgaagaagaattccgcaacgagaagaaagagaaactggctgaaaagacattcggcattgccatggagaacttcaaacgtaagactgaacgcctggcacagattgccaatccggttatcaaacaggtatatgagaaccagggacacatgtacgagaacatcctgattcctatcacggacggtaaacgtatgtacaatatctcctgtaacctgaaagctgcttacgaatccgaatccaaagaggtagtaaaagcatttgaaaagtcaatcctgctgcacgttatcgacgaagcatggaaagagaacctgcgcgaactggatgaactgaaacactctgtacagaatgcaagctacgagcagaaagacccgttgttgatttacaaactggaatctgtaacgttgtttgactcaatggtgaataagattaacaatcagactgtttctatcttgatgcgcggacaaattcctgtacaggaagctccggatgaacaggctgcccgtcgtgtagaagtacgccaggctgcaccggaacagcgtcaggacatgagcaagtatcgtgagaacaagcaggacctgagtgatccgaatcagcaggctgctgccagtcaggatacgcgcgagcaacagagacgtgaaccgattcgtgccgaaaagaccgtaggacgtaatgatccctgtccatgcggaagcggcaagaagtataaaaactgtcacggaaagaacgtttgataaagaagagttcaagtagttaattagtcctaactactttactaaataataaaggctgcctgacaagtcagtagtatccgcaattccccttcttcgggaagaaggggtggctgaaagccggggtggtaggtggatacacaatgctgataataatagacttatatattcacctaccacctccccctacggggactcctccttcccgaaggaggagagttttagatactatcgacttgtcaggcggcctctttcttttattcgtgcaaaatagtacttttgttcaaactactaaatgaatcaaactatggcaaaatcttattcactggcattcatctctctgttcctgttgctattcaacagttgccagagcatcgaacagatttccattgattatctgcaacccgccgacttgagttttccaccccagctccgcaaggtagctgttgtgaataacaccagcgatgcaccggataacaaattgattacagaagtacagaaaacgaaggaaaacgttccggaagtaagtcgcgccacagcctatgccaacggtgatcccaagattgctgccgaatcattggctgaagaaatagcccaccagaattactttgatgaagttgtcatttgtgactccgccttacgtgccaatgacaagttagcgcgtgaaaatatgctaagtcaagaggaagtcagccagttagcttccgatttaggagttgattttattattgcattagagaatctgcaattcaaagcaaccaagaccattcgttatctacccgatttcaattgttatcagggagctatggatgtaaaagtatatcccacagtacgggtttatgtgccgggacgaagcaagcccatgaccacccttcaccctaatgacagtatcttttgggaagatttcggaggttcggtcacagaagcggctgcccgtatcatccccgaaagggaaatgttgaaagaagctgcggaatttgcaggaacagttccggtaaagcatctggttccgatatggaaaacgggaaaacggtatttatacaccggcggttcggttcagatgcgcgatgcagctatctacgtccgcgaaaattcatgggataatgcattcgaactttggcatcaggctttcgaaggaaccaagaacacaaagaagcagatgagagccgccttcaatattgccgtgtattatgagacgaaagatagtctatctcaagctgtgaaatgggcggaaaaggcacagcaactagccaagaagatagagaaaaagaatgttgtcaacaatgtcaaagcgagtattgacgatgtgccgaattattacctcaccagcctctatttggccgaattgaaggagagaaatgctcaaatatccaaattaaagatgcaaatgagccgatttaatgatgatttttaaggaaatcatgtatcaaatcttattttttttatacctttgaactgacaaaaagaaggaacctatgaaactgagccaacaatcattatctatcatcgaatcggctatccaaaaggcagtcggcaaatatgtatgcaattgtgaacagacagtcgtaaccgatattcatctgcaacctgaccagacgtcagggcaactgaatatttacaacgatgatgatgaagaactagcaaacgtcatggtggaagaatgggcaacatacgacggcgatgatttcctcgaaaatattgagcccggcttacgtagtatcctttgcagaatgaaagatgcaggtgacttcgacaaggtgactatcctgaaaccttattcgtttgtactggtggatgaggacaaagaaacggtaactgaactattgttggtagacgacgatacgatgctggtgaatgacgagctactgaaaggattggataaagagttggatgattttctgaaagagttgctggaaaagtaaaatctaatatatggcaataaaaaagattctgttattataacaaggcaaatgtagaagcggctgtacaaaggcaattcaacggttcggacgaagtaaacaagttgatgtggattctacaagaataaaaaagaacggcatgaaactaaatttttatatactactcttatgccttagcagcataggaataacaagttggggtcgcaatgcgaccccaacctctcatctcaccgtcctgcaactcaacatctggcaggaaggaagcatcgtagaaggaggatttgaagccatagccgatgaagtggcacaagttgatgccgatatcgtttttttcagtgaagtccgcaactacaatggcacctgctttatatcccgcatcattgaggcacttaagaaacgtggaaaaacttactatggagaacataaccctctggatgtaggcattttatccaaatacaatataagtcagcaggagattatctatccaaaggacagcggttgcggctctatcctgaaagcaactatcggcatagccggacatactattgccgtttattccgcccacttagattataagaattatgcttgttacttacctcgtggttacaatggaagtacttggaagaaaatgacacaacctgttcataatgcggattccattttagcggccaaccggatcgcctttcgcgaagaagccattgaagtattcatcgaaaacgcacggcaagacattgccgaaggagccattgttctattaggaggagatttcaacgaaccttctcacctcgactggcaagaagatacaaaagacctatgggaccataatggggtagttatcaattgggactgttcaagtatactctgcaaagaaggattcaaggacatatatcggactctatatcctaacccggtcactcacccgggattcacttttccttccgacaacgacaagatgcctgtcagcaaattaacttgggcacccgatgcggacgaaagagaccggattgattttatttacttttatcctaatcaggacattacaccgatatcctctatgattctcggtccgtcccgttccattgtcaaaagtcagcgcatagaagagaatacagaagacaacttcatcacccccaaaggcatatggccttctgaccataaaggagtaatagccactttcaggatatctccccaatagaacagacttttccagcttagagccgtattatggggagatactgctgatctgtcggacagctcctctttttattacttctatattactagtttatcggacatatagatccaatgtgttggacatatataatcaacgcgttgggcatatagatccaatacgctggacatatagattcagcatctcatccataacagcctgattacccgcccgttaaacccggtagacaaattgctgttactttatttattttcgtccatagttgaaacaaattcttcgacttttgaaaagcagcgctttaggtaggctaaagctatgctttacacactctaaagcgccgctttagagttcaaaaaaggacactacatggaagtaaaacgtacagggtgaagaagtgaaggacgctttcaatcgtttctccttctctccttcaccctgtatctatttattcatcggcagtccaacacgaagatgaacctgatgaaccctcaataagagtataaaaataaaattgctattatctcatacttttgaatcaatactcatgagccttttccgcccaagctttctccataccatagaaattaatcacttcaccgctagctttgccttccaactcctgttgtttctgctcaaagaaagttttccaacgcagataatacaaatctttcaaaagaccactccattcacgatgagaataatcatgcaaacctccctgattggaagcgatactatcaccccagactgtgattaatgcagatgcattccattcatagagtttcttttccgcgtccgtattgcccaaagaacgtgcggcagtcagccaagaagatacggagaattctttccgggtagacaataaactgtcttgcgacaaaatgagttcaaggaactgctgcgtctgcttccggaaattctctttgtctttacgatcataactttgggatatttcatcgagcaatgcattgcctttatcagcattactctgacgtacgatatccaccaagtcatattcaaaattattgttgcctttatattgttcagccacagagagcattaagtccgctgctttcgaagtagaatcaggcgaatagaacagtttggaatatccccatgtagacgttctgtccaaatggaaacccggacgggcacacaataaggattccaccgttccctcaccctgataattcttgggagcattataaaccgtatgttccaatgctctccatgcttccataacttccggtgacagttcaccaccataacgggctttcagatatccttgcaaccatgtatccggcgagaaacgttccgcacgccacggcaactcatacaacaattcaaacatcaccggattattctcaataccttcgggagtagtacctactccacgcaatgttttcccatttgcatgtgtacacgcatcgtaatatccgttcaccaactgattcattcgtccatgcaaaccgacatttcctccgaagttcaacaacatacaataaagccagtcatgcttgccaaagcctttctcacgataccacatcgaatccggatccccccattgaggaagtctttcgctatacaaatccagcaccaacatatctccggcattcaacacatcaaccatagccggacgcggatttgcctgccatgcctgaatgacccaaactgcttccggattggctttcttcatggctttcattatagaagttccggccttcgccaagtctaccccttctgtgttgcctccctcatggaatgggtccatactataatatttagcttttccgtaaagtttctccaattcttcgtagtacatagccgcaaaagaatcgaaatgctcgtcttccgaagaaaggaaggccggacgagggaaaccgcaccacttgccggggtcggcaatctgataacctagtttctcaccgatattacggggaaccattcctgcataacccggaaatacgggttcaattcccagttcccgcatacgggatacgatcttcttttgaagtgcttcttgttgctgataccaactgtcaggattgggtccgccccacccttccagattgttcatctgccaccaggccataaatgccggaccggagataaattcattgatttcttccgttgtgtatccgacacgtttcagcagattataccagactacttccattccggttatgctcaaaggcatattaatgccatgcaatgccatccagtcaatctccttctcccaacgttcccaatcccagaaagccattgagtaggaataagtacaataattcagataataacggttttgcatagctgtctcctgacggattttccccgtgggaagagggagcacttccggcaacttttgtgacgggttattccaggaaagatgaataccggctacatacttcagataccagttcagtcctgttgccaatgacagatcggaatttccgactatcaggactttaccgtcttcggcagttatttcaaagtaatccttagacacatcgtctttttccggtgtcatccgaaaaaggattcgatctttcgaggttccttccgttacacgttctgccaaagaatttaccggtaactgcttcggttggcagctacaaaacaaagtcactccaaataataaggttatcaaaatacgtatgttcataatcgtgttttttagatttgccaaagatagtaaatagaaatcaaatttcttactacctgtacactttaatcaatgaaacaagaagaattgcgggcgaccgtatacgtttatctcttttaccttccctgacaaaaaagcacctttacgtactttgaagcgaagggctgatattttatagatttcctttatgtccacaatgatacggtgcggctgtccgggttccgttgccggatctgtatgccagaatgaagaaatatctccgtcgaacaagttctccgctacacccagattcttatctgcctgctcgctgcttacgtaaacaacttcccatttggtcttatcaatcggttgtcccttatcgtccaacaaatcaacctctgaaatacacgcctgattgtcttccgtataagaagaaagcgtttcgatgcaaaaatgacgcagagtgcgcacaaccggtaaatcaacttgctgccaatcgtttgtctccgccaaagtggtgttcagaagaatatctccttcttcgagaatcggactgcctgtttgattgcgttgctgtttctccggcttgtttttatcaatacccaaactgtcgagaatcggcttgtccaatccctgcaagttcctctttcccgtatcctccatttcgaaaacaacaatctcattctcaccttttttcaaccagggagcaggtatataaagagtttgttgcggaccgatattccagaaacgtcccaacgatttaccgtttacccagacagctcctttaccccattggctcatatcgacaaagcaatcgccttgctgttcgataatgaatgtccctctatgaaatgccggaacgcctttgatttcttgtccgaaagacaaggaagatacttcttccttataaagaggaagcggtgtgattgaccaccctgtcaatttctcattcccccaaagcacctgacttgtaattcctttacggttaaaaagaatatcgggaccataattgacccgtccggtattttcaaccagaatctcaagtgtggcgggaactttatgaatatccaatgtcgtgctattctgattataacgacggtcaaggctggctacttgtttaccgtccaccagaataacggcataatcacgcaaatcctgaataatcaatttctgttttcccggtgtcttaatggtagtctgatagtggatatatccgaaatcggctcctacatcttccatggataaaacatcttccgattgtatagtctgatgaaatgccgtagttaacggagcactttctttcagctcgaccgtcgcaaaggttgtggtcggattatcggcaggcacttccggcaactgtgttccctccggcaggtatttctgaatgatctcccggaaagcatgatatttcggatagcagttgccccattctccaagcggagcgtcataatcgtagctggtaggttggggacggaatcctccgctggtattggcaccgttcatataccagaaatttgttccgccgtggaacatatacatactgacagatacgccatgtcccaacatccaatccagttgttcggcaggacgctcgtaggcaacagaagaatgacgtttcccccattcatcaaaccaagccggatagaactccgccacaaagtacggaccgcccggatgatatttatccacgattttaaatatatcttcgccgaacacgccgttcaaagtaggcaatgcaccggcaatatgtccggcttccacctgcccaccgccgtcgcaagtaaacaacggaacattgaatccggcttcttgaagcatatcacggatagcagcaaggtattctttgtcggccgcatacgaaccgtattcgttttccacctgtaccatgataatattaccgccgttgttgatagtcagaggggccagttgcttgccaagttccttgatatatcgttcgcaataagacatgaaacgcgggtccttactgcgataagtcaagtccttttctttcaggagccacgaaggataacctccgaaatcccattccgcacacacgtatggcccgggacgaagaatgacatacagcccttcttcctgtgcaatacgtacaaactcggcaatatccgcttgtccgctgaaatcaaatactccgggttgccgttcgtggaagttccagaatacataagcagacacggtgttcaaccccattgcacgcgctcggtgcagacggtcacgccaatactcgtgcggaatacggggataatgcatttctccgcatatcaattgcacatctttcccgttaatattaaaagtaccattttctattttaacctgttccctgggggaggaacaggctgaaataaaaaatgatacaattaagttaagcataataaatacgttgcttctacttttattcatctttattcaaattatatcataagtattgaatgttccgggggcttcttcaaatttggtggttatttagcaagtcggtggtatctccattcccctccttcgggaaggagaatggaggatactatcgactataaactagcaaatcattattttacaaattcaccttaccgacaaatttaaagagtaatctgctccgacttgcccacaagatatcggtttgtcccggccgaagcattcatcaatccgtatcagaatgtaacttcaccgaaaatattcactgcatattttcctgcgtcatcataccaatgagtgagtttctccgtcggagcaaacttgatggcgtaagccggattgtatttcaaatcggccactttctccggcatccagattccaactttgtatgtcccgctcaatccggcagttgcacttccttttataacatacttcgctacctgattcggttcttcatttgtagaaggaatccatgttttaggatcaacatccagctttatttctttagctacctgaccgtctccggaaaccagcacaagatatacttctttcggattaatcaccgtagcaaaaccggtattagttatcgtcagattatattccaagtttccgtttttcgcctccactgtcgattcgctttgcagattcaaccggtatcccaaatggtcacgtacaaattcatagaatgaacggacaacctcatttccttcagcgtctttaaaataactctcatcaaagagaatgttattatcattcagcaaagaaggatatacttttacttgtttccaactcatgatattcaaatcaaaattctgcgttatatcaaaagccgaataacggtgttcacgcaaaatacgcaatgacttcatcggagtaattagtgcagccaaaccccattcggtatcttcattataaggaatctcaccactcatatagaaattattcgcttttacctccccggttatttgtttataatcatccgtattgggaacaaagtcattgcccggcgcatgagaatgttcaccggctgtaaagtaatcgttcgcatatccgatacgtccgcggtattcttcctgctccaatgtcaatgctttcttatgactcgggtaacgcatttctacacaatatggaacaggcaaagctcttaacagtgcactgacaattgcattcttcgcatcctgatcatttgccaacggcgacgtatgccactctccccaagcaccaataaaaccaacttgcaccgtagcaatctgaccgatatattcattcaacaaaggtgtcaattgttcaatatgcctaagaatccattgtttagattcaccgccggacgtattaagccccgcatgattgtatgcaaaacgaagaatagctttatatccctgcgctttcatcaactcaaacaccttgcggatattattcaaagcctcatcatcaagatctttactcacccatttggtcagatagatatattgctgcacaagagtcagattatcgtctttcgcatcaaactgctctattttctttttatacaaatcctcaccatatacttcataatcattatatggacttttcatctcatcagccagcaaattacattcaagatgaaagcctctatcaggatttctcaacgactcgatatgaacgattttacctacaacttccggagtttccggttcattcgtaccttcttcctctccatactgtcctgcatacacatctatcgtatcagaacaaaagctacacataatacctaataataaggtagataatatggtcatagttttctttatattgattaacatgattgatctatttttaattttcacctgattaattttcattgaagataaaacgtgcaggagcccctgttgtccaaggagtccacaatgttgctccgccatcatgaagcatacatccatgctctgtattatcagtcaccaacaaatagcaatactgtccggtgtgattattaatattcggttctacccattgaccggaagcacacaaattaaatttccagtcattcaaatgagtctgtcctttcactgactcataataatcagggtctttcaaaacattccattgaccttcagctgttcccgcttcggcaaacaggttcttatactcctgcatagtcggtaagcgccaacccgtaggagctattttgtcacgaatgtcataatgataatgaactccgtatgctttcactctgccttctccaaaagattccggcgtattcttataattatttgactcaatatcagttccgtcaggatacttggtcgtcctcaaattatctgccagccaaaccagtgaagttccgtcgctataagaaatacgggcaacccgataagttatcttctcatcaccgcgaacatcaatgaaacgcatcatttccgtcatatttagtactccggaagaacgtgacaccagttgcccgtcatcagtcttcacattccaatatatagcgttggatgtccaacgtttaatagaaagttggtcgagcaaggtctgaagttgctcgtgtgtcagagaagacttaccttttacaatccctacactttgctcggctacagtctgtttcatttcaggatcaagtgacagacagagtgaatatgaggttgattcaggccttccttccgtatcccattcaaactgtacggcagtttccggtttatcttcagccaaagcaatctcagtcatatcctcaggttgtaacaacttggtagacatacgtttcacatgaatcgtatgcacatccgacgcagcagccgtagtattgccagcctctttaacagtccaatacaacagcgcttcttgaccggcctttattcccaactgagagaaatactgatcggctgccaatacagacaaagtaaaagaggtcgatttaccagcgtcaatcttcaccggctttttgaaatctctggtagcacaaagaatcagtttggcacctttctccaatgccttatcccatgagaaactatattcatcgattgacaaatcattcaagtcaattttcgctccatcctgaggcgcactcaggtaaatatccgacataggaataattacattatacttgtcctctttacatccggcaagtaataaaatacctaatagagtatataataaatgtttcataatactatccatttttagtaaccggggttttgaattataagaccttgtccttcagtaatcaaatgagtaggtaacggaaacttctcatatttatattgcccgtctaccttcgtttcgattttaccagtcggctgacctgcaaatcttgctttagcaagtgccgcttctatgaattttccgtgacgaatcaaatcctgtcgacgtacaccttcaaaatagaactcatgtccacgttcttccaacaatttatcaaggaaatcttccactgaagcgaaatcactcaattgataagctttcagtccgccatgggtaacacgtacttgattcaataacccgacagcttcctgagttatgctatttccattgcggacaatagcttctgaaagtaaagtcaatacgtctgcataacggtagattggcatatctatttcacacagttctcctatcaccccttcgattttatacttaaccggaattgcaccataaaagagtacacctgttgtacctccgtcacggtcaagagcacgactgtgatgcacgccttccgtaccagtatattcacctataattctttcccgtcttttgtctttaggatcaaaagattcataggcaggccaggatattttataccctccccatgcagtcaccgccattcctgccggaataggatagtcggatgttaatacatgtgcaaaccacttctgctccatcacaccagcttccgctacacaagagaatattacttccgaattcttttctcctgataaagaaaacaaagaatgataatcgtctaccagtttataaccgtattcggatttagtcaattcacgtcctattttctctgcttcatcccactgtttagtcatcatatagaattttaacaacaatgtgttggccaatccttttgtaaaacgtccgtaatccgtatcttcatatttataaggcagtatgtcggccgcttccttcaggttagtaacaatgtattcacgcatcgcttcttcagacaagcggggaatcacaatctcagcttccggtttctgcaaagtttccaaatctgcaataggtatcggaccatacatatcatacatcagaaaagccagaaaaccacgtccacattttaattcggccatataacgggccttcaatgtttcatccatatccacgttcttgatacgttccattgtcaaagtcatggaagccagatattgggaatagtcatacacgcggcgataatctccgtcgatatgccagtcattagcttcatacgaattatatacggtagtccacccccatgtattttccacataatcggtcaccatttccgaagtcgtcacataacctgccgccacctcaaaaatcccccacggagaaaaaacgtaataagcacttgagttgaccaacgcatttacatcttcagcattctgcggaaacattcccggatttattttattataaacttcctgttccagcgtgcaagacgatatgaggaacaaaagagttgctattacagtataaattgtctttttcatattcataacttattagaaagatattgatacaccaaaattataagaggtcacattcggatatgcataagttccgttatccgtttcaggatccagccctgtccaattggtaatcacaaacggattgttcacatctacatatacacgaagattattcacgatcttttggctgatcggtactttatatcccaatgttatacttccgcaacgaacgtaatagatagattttacgtaatagtctccccaaccgtttccccctctcacgtaggtaggatcagtagctgtcaagttattactactgaacgctttcaatgcgtaagtggaaacgttgataccattatccatgcgtgtccaaccttcataatagctggctccccgctttctacccgcttctccgtaaaaatagatattcaaatcaaaattcttatagcggaatgaattgttcaaaccgtagattattttcggatcaccattccccatatagaccttatcttcatctcctaacacaccatttccatcccgatctttcaacttcatcattcccggaaccaaatctttctgggcatccggtgccttctctcccggttgcaggataccgattgcttcatattcccaccatgcccgtatcgggtcatcttctttttcataggctcttggcttccagttcggatcacgtttcaaccaacggtcattataatgcgataaagtcaatgtggtatcccattcaaagtcttttgtaacaatattcactgtattcaatgtgatttccacaccctggctttgcgttgatcctatatttcctgcaattttatttacctcattataaaatggcaagggcttgtttgtcactaacaaatctgttattttacgcttaaagtactcggcagccaacttaaaccggttattaaatattccaaagtctactccaagattaaattccgtagttgtttcccaagtgatactcttgtttcccaaatccgaagcatatactcctgttgactccgcgcctccaataatggcatttcttcctacctcataataatcataaatacgataaccgacattagaattaccggtctgtccataagaagctctcaatttcaacatggataaccatttagaagcccctttcatgaaattttcttcactaatcatccaacctgctgatacagaagggaaatatccccaacgattttccggtgcaaaattagatgcagcatcagcacgtaccgtggcttccaacaaatattttcctttgtaagaataattagcacgggcaaacaaagaagcaatactatttatagaagcccatgaactgacagaaggctttttataattacccgaccccaaactgttatacccaaatccatccaccagaaaatctgaatttccggcactgaatccgtcattcttgaacttttggaatgaataaccaccaatagctttcagattatgatcaccaaaacttttagaatattgagcggtcaattccattagataagtagtgcttgtctcttgtgaaatatctgcccttccattcttatttgccccttgcaaagttgtcttaggcaaataactggaacgtttctggaaactgcggtcagctcccaactgtaatttcacttctaattctttcaatggttttactgaaacaaatgctgaaccgatcaaccgatcttttaccgtattatcttttatttccaacaaagaaaccggattcgcaacaaaaggacgtttcgggtcaataaaataattcccttcagaatcataaataggaatagtaggattggactgaatagcaccggtcaacacacctgaatattcattaaccttatctcctaaaggaacgttatcatacttattctgtgagtaagtagcggttaatccgaaagatacatatttacttaattcttgatccagatttaaacgggcagaaaaacggctgacaccattattcttgacaataccttcttgatccatatagttgacggaagccaaataacgggttttctccgtaccaccattaacagaaagattgtgttgttgcgtatatccgttacgcattaccgcatcaagccaatcagtaccacttgccaacaatatctcatcattattgaaagctggtttatattgagtgggcggagtatccggtttctccacatatcctttataaatccccattccattcaacttcagccactcctcgtgctgctgcttattatacatatccatatacatacgagtatcaagcatcttataattcgaacgggctacctgcacagatcccataccggaataagtcactctgggcttctgactcttaccgcgttttgttgtaatcagaacaactccatgaccggcacgtgctccataaatagccgtagaagcggcatctttcaaaactgaaattgattcaatatcatccggattcaaagactccagcacattatcaatattaccggattcataatagccgttccccgaacttaaattaccggaagacgataccggaaaaccatcaataacaaacaaagggtcgttacctgctcctgtagaagcctcaccacgaatacggaatttagcctcaccgccaggttgcgcagagatctgatttacacgaaatccggcagccttacctgccaatgcacgagatacattcggaacagtattcatttctacatcacccatatttaccatagaaacagcacctgtcaatgtctttttactctgtgtaccataacctaccactactacttcttccaattgtttggaatcttcctgtaaaatgatttttagatttttaccgacttgcaccgcaacagtctgtgactgatagccgatataggaaatatccaattgtgctttcgatgaagatacggaaagtttgaagataccgtcaatgtctgtaatcgttccatttccctgtacgcctttctccaatacactagctccgattaccggttcaccatgagtgtccagtaccgtacccgatactgttactttcttttcctgctgtggtgattgcgcttcaacagacaatattattttcttatccaacaccgaatacttcacattcgtaccggcaaagatttccttcaacacactgaaaatattacttttatcagcagacacagaaacacgacgattcaaatctacatgtttgttattgaagaagaagtcaaaatccgactgcgcttcaatctctttcaaaatatcctccacacgctggttgtgaacatcgatactgatcatagctttctgagcgtaactatcggctgcataacttagtccgatagaacatactaagaacaaaactaatagtctcatagataatgggattttttttgaggttagccaaagcgactttatcacccataaaaattggatgctaaaataattttgcataaatttgtaatgacttaaagttaataaaaagtttatctaagcttgtcgccaaacaagcattaaaaagatttactggtttccatacgggaagatacgccaatatcatcccgtatgtttttcatttaagggggtctgtctttcatacaattacttttcgttttaaggtaaatcaattaatatatttctatcttactcttttcatcttttatattcggagaatcaagataccgccaacgaatctgggaggaaagttggaaatactctaagatacgttccagacgttgattcgtgaatgttcctgtaaacgagtctcctttcaagcggtcattcttaattataaattctacattatatcgtttctccaacattcgtaagccttcttctaaaggagtgttcctgaatataattttcccttctttccatgctgtttccgattcaccggaagtggcataaagctgcactttacaatctctcgaatcataaacaagtttttgtcccggatccattaatacctttttcgacacattatcctgtgtaaagatgaatcctatctttccttccaccagtgttgccagcactttatcatctttctcataggcttctatattaaaatgtgtacccagcacttctatctgcgactgatgagaagtggaaacgataaatctcttttcgggattcttggcaacttcaaaataggcttctccctgcaaggttacgtttcgtgtatctccgttgaaatgtgaaggataagtcaggcgtgattctgaattaaggaagactaccgttccatccgataaagttaatgaagtggtcattcccggattggtctttacttccaacatttgtgccagttcctgttcgtctcctccccaatagtgcaccaactgaacaacgagaagtggaatgaacagaactgcggccgcacgttgtgcccattcccaccacatcgttttctttctacctgttatcctgccttttaccctcgacaacgctttttccgtatcgactttcttcattacatgaatggtatccgtagccagataaagcgaatgaatctgtttggctacccgccggttctcctccgattcgttcatccaagcctcaaccagcagacgttcttcttctgtcacttgtccctcacaatagcggggaagtaattcgtctattttatttttatcaagtttgtccatatcctctttttcttgtcttttattataagacaggagactccggatagattcctaaactaaaatccattttttttcagaaaatctttgttttcttataaaaaagctatatttgcagtgaatttacaaaactaatacatgaaagaaacctaccgctcagaaaacgatttcttattatcagccgtccgacacggagatcaaaaagctttcgacacgctgtttcgaaagtattatccgatgctttgtgcatacggtcatcggtttgttgatctggaggatgcggaagaaattgtagaagactctcttttatggatttgggaaaaccgggaaactcttgtcattgaatcttcactgagttcctaccttttcaaaatggtgtaccgcagggctttaaacaaactcgcgcatatcgacgccacccaacgggctgatacccgtttttatgaagaaatgcaggaaatgctgcaagatacggactactatcagatggaagaactgaccaaacgaattgaggaggctatcgcagcgctacccgaaagctatcgggaatcttttgtgatgcaccgtttccgggacatgagttacaaagagatcgccgaaacactgggagtatcacccaaaacaatagattaccgtatccagcaagctttgaagcaactgcgcacggacttgaaagattatcttccgttactactgccgattctatttccttaatacaaaatttacccttttcggtaaggcaacgtaaaccagaaagtagaaccttttccttcttctgagttaacgcctatttcccctttcaaatgctcgacaatcatgtgacaaatggaaagtcccagtcctgtcccctgaataaacgggttatatttcacaaaacgttcaaatacgtgccggcattgttcgggcgacataccgcaccccgtatccgaaacataaaaatagatcgtattaatatctttcatacggtatcccatacggatactgccggatttggtaaactttatggcattaactataaaattagaaagtagctgcatcaggcggttcttatctatataaagcatacattccggcagacgttcgcaaaaagtgaaagttaccgcatcattcttcaagcgcagctgcatactttgctctatttcctccattgtctgattcacatcaatcagcgccggacagaaatcgaatgtcccggcttcaatcttcgacatatccagaatgtcattaatcagttgaagcaacaagttagtgtttgtttcaataatatctgtgtattcccgcatttcctcacgatcatcaacttccggtaacatatttgaaaagccaacaatagcattcaacggagtacgtatctcatgactcatgttagccaagaaagcagacttcaattggttggcttgctccgccttttccatagcttcacttaaacggctgtacgctttccgaagaatacggatataataggtaatagccgttaccaaaatcaccaatatagctatgcagacaaggatttcgactttatgttgctgaaagaaactttggggctgattgatataaacagctgctttcggataacgataagaaggtatattatgttcctccaacaccggatagcacagataggcattctcctttccaccggtagtttccggaatattccgggcttgttctccgtccagaatccggtaaagtatctccagcaaagactgcccgaaagactccgccgagacataatatccgcctgcgaaagtattgttagacaaatcttcggacgacagcaggaataaaggagatggagtaaaattggatatcacatcttgaatatgatcaaaaagataattattatcatctttattgtgtgattcaaaccaggaataataaataattccggtattcgatttatagctgtgcagagtatccagcaacgcttccgttgacagttgagtggtagaaagcagttccaatggcaaatccgggaaatacttggttacgacttctttcatatcacaacgagtctcctcgctaatatatcggtcgtctgaaataaatgccagacgtttcatatcaggaatcaactgacgaatcagctctatcgtttcttttatgtaataatgctgctttagagtggtaatgttatatccccgcctccattctttagccggaacactgtttgcttctgtcaacggagcgtgagacagcaatatttccaccgaagccggcaaacggtcacgggcattcgtcactaccacgggaacatctttccagacatcatcaaacaactcacggcagacaatccaacccggatcaccaatcagtactattgcggcaggcggaactggatacttctcgcgcagacgggtaatcaccgcatttacttccattgtatccaacaaagcgggaacagacaatgattccgccttaacagaaacacccctctgctgaagttcatcatgtacgcaccagtaaaaatgtttcgaccaaggtaaattgaaattgatagaattcaagaccaatacttctttctccgcctttccggtatctgccaacatgggaaaaagaagcccttcaaaaagaatgaaggagtagcaaagtataataatccgtagtgtttgcttcatttgtcggtgatattaaaagagagaacaaagatagtattaaaattcaatctaaaaaagaagaaggtgtgtcgtaatacacgatgcgccttcttttttttcattgactataaaaatcggttcattttctttaagctgcgatattttgaggatttctttggtttatgtgttcgcaacatctaaatagagcaactgtaagctcataaaacggtctaatcagccaatccataccttctttagtcatttttgcacacatcttttttatattgaaggcaatggcaaagaaggaaaagtccatgaagaccttatcctttccaaaatggcggaaacgtttgtaattcatattgtttttcatttgtccgaacacggcttccggttctatgcatctctgtcctctgtgtttcagtccttcctctgagcagagcagctctttggctttttgcttgtattttctgagtctgtgattcaactctatcgttctgttcccctttgctttaaaacatcggcatcttagcggacagccttcacatctgatggctctgtacgtggcattttcgctgacatatccggatgctgttttcacatgtctagtccctatcctttgcatcttctgtcccatggggcagatacaaaagtcttgttcttcattgtagtagaagttttccgccctgaacgggtccggtttgaatctcggccgctgttccatgtggaagtagttgtatttgacgtagcccgccataccgttttctgacatgaagcggtaattctcctcagaaccgtagccggaatcggccaccaccgtatgggccaacctgtcatatctgcttgagaaggattgcaggaaaggtatcatggtcagtgtatccgtagggttcgggaagagtgcaaaatcggtaatgaactggttctcggtgccgatctggaggttgtaaccgggctttgtctggccgttacgcatggcatcctccttcattctcatgaaagtagcgtccttgtccgttttggaataggagttcctgtcctgtagcgtgttcagacggttgtcgtattcctgcagcttgtccctgtgttcttccagttccttcagctgtttgcgtttctttttcaacgcagtcttttcctctttcgtggagggctcaggaacctgttcaagtgctttccgcaattctccagccatttcagtcagcatggccggagtgaactcaatctcctcattgctttccgatgagttctcctgggcgatgacatcgtctatctgccctaacaggacatgtatcttcttcatcaggcgttcacagttccgctcaaccgtttttcgccagacgaaagtatacttattggctttggactcaatctttgtcccgtcaatgtattccacattcagcctgatgaagcctttggaagagagaaggagtacggtttgggtaaatacctcgttgatttcctttttcacccggttgcggaaacggttgatggtaatgaaatcaggtttctcatatccggcaagccagatataatggatgtcacgatgaaggagcttttcaattttacggcaggagtagacgttgttcatataggcatagagaatgaccttgagcatcatcctgggatggtaagggctgcggccgcattccttatacaacttcctgaaactttcaaggttcaggctctcaaccagagcgtcaaccatccgaactggatcatgctctgcaatatcctcgtcaattctttgaggaaaaagcactgtttggttggaattataaggacgaaaatgtatctttgtcatagtgaaaatcttatgcctaaagatacaaaatctttaggtaataacaaagccccagcttgtgaaagtcggggctttgtgcttaaaaaaaagaaggtgcgcattttgacacacctccttgtattgcataaaattaagtatcaagtgattatcttttcaacaaaatggtaagactttctttcaaagatttgataatactttccgcatctgcctgttttttgcgttcaagttcgattacggctgccggagcattgttcacgaatttctcgttgctcaacttcttcacaattccctgcaagaaactttccttatgtttcagttctgccagcaaacgattgatttccgcatctatatcaagcatatcaatcaacggcacggcaaattctgttgttcctatcatgaaagaggcagcaccttccgccttgttatacactaccataatagatgacaagttacacatcttcatgataaccgaatttagtttctctaccggatgattacctatcacctgcaatctgagttgttccttcatggcaatattcttctgcaaacggatactgcgaatattactgatgatttccttggcaacttcaaactcctggaggaatttctcattcacttcgaatgtctcactcagtcgggtaaccattaagctcgcacccggttcacgttgacgcagttgctgccacaattcttccgtgataaacggcatgaaaggatgaagcagttcaagcagacgttcgaagcaattgataaccattgaataaataaatccattgataggttgaccgtaagccggcttcacaatctccagcaagtaggaagaaaattcgtcccagaacagtttgtaaaccaacatcaacgcttcactcaaacgatattttgagaataagtcggccatttcaactgaagcagcgtccagtcgctgttcgaaccactgaacagccagatgagcatcttcaggtaccggaatcgaaccttcggcattggtccagcctttaatcagacggaaagcattccatatcttattacagaagttacgtccctgttcgcagagtgcatcatcgaaaaggatgtcgtttccggcaggagccgaaagcatcatacccatacgtaccccgtcggcaccgtacttatcaatcagttccaacggatcgggagagttaccgagcgacttggacatcttacgtcccagcttgtcacgaacgatacctgtgaaataaacgttcttgaacggcatttgtccttcgtattcgtatccggccataatcatgcgggctacccagaagaagatgatatccggtcctgtcaccaggtcgcttgtcggataataatatttgatttcttcattacccggattgttgataccgtcgaacaaagaaataggccacaaccaggaagagaaccacgtatccagacagtcttcgtcctgacggagatcttccattgtcaaagctgcgttgcctgtcttttcctttgctttcgccaaggcttcttcgggagtggctgccactacgtaaccgccttccggcaggaagtaagcaggaatacggtgtccccaccacaactgacggctgatacaccagtccttgatgttttccatccagtgacggtaggtattcttatatttcgccggatagaatttcaattcatcattcattacaggaggcaacgccatatctgcaaaatgctgcattttgaggaaccactgcatagacagtttcggttcgatcaccacgttcgtgcgttccgaatatcctaccttatttgtataagcctctgtcttttccaacaaaccggcagcttcgaggtctttctcaatctgcttacgaacatcgaaacggtccataccgatatacataccggcagcttcactcagtgtaccgttgtcgttgaaaatgtcaatgctgggcagattgtacttttcacccaacatatagtcattcacgtcatgagccggagtcactttcagacaacctgtaccgaactcaatgtctacataatcgtcttcgataacaggaatcacacggtttaccaacggaacgatcactttctttcctttcaaccacgcattcttcgggtcattcggattgatacacatagcagtatcgcccatgattgtttccggacgggtagttgccactactgcataacgaccttccgcatcaccctccactttgtaacgaaggtaatacagtttgccatgttcttccttgtagataacttcttcgtcagaaagggcagtcaatgctttcgggtcccagtttaccatgcggacacctcgataaatcaatcctttattatataggtcgacaaatactttgattacactttcactgcgtttctcatccattgtgaaggcagtacgatcccagtcgcacgatgcaccaagcttgcgaagctgtttcaggatgattcctccatgttcgtcggtccactcccatgcgtgtttcaggaactcgtcacgggtcaggtcagttttcttgatcccctgagcagcgagtttatttactacttttgcttcggtagcgatagaagcatggtcagttcccggtacccaacaggcattcttgccttccatacgggcacgacgaaccaaaatatcctgaatggtattattaagcatgtgtcccatgtgcaacacaccggtgacgttaggaggaggaatgacgatagtgtaaggttcacgactatcgggttttgaactgaataaatgattgtccagccaatactggtaccactttccttccacgtcggcgggattgtacttacttgctaattccatattgttttatgtatatgataatgtatattcaaaaataacgggtgcaaaattaataattaaaattcaaatcttaccaccctcgggctgattctgtgcacggaatgagaatttatatccctcataaacagcaaatccataaaataagatagtcatggaagccagattctcggtcatcaaagagaagatttcagcatagtctgctccaaacaatacacccgtataggacatatcataatccttggcaatatatccgatgatagaaaagaaatcacccaacacacaactaagtaaagccagcgttgcgccgattattccaaaaacaggacgtatcccttttccctgccgcatggcgaaacccaccagaaaaccgataccgatagccatatatcctatctgataaccggtagaaacagatattaatccccatgccgccgcacccactatacaagcgataactgcatataacacacccttcggcagattttcttcggcaagcatttcttctcttgtcaacgttacagggaagtcatccggtttgggcggagccattttctccagttcttcgtctttctgaaaactttcgcactcctctttaaatgcaggaaggtctctggtgcgagaacatacaaggccttttccattcacaaaatcacgcgacacgcaattccggcaatacttctcaatttcttcggtcgtagccattttttatccggtttatgttcaacaatcgcctctatcacacggggaataaagtcactgttaaccttaattccgcaacactattacaaatataactttttaagtacctgagcaacaaaaagttgctcaggaatttgccatgtcagatttttcacctatcttagtgttgcaaatcaaaatatgtatcaaacccgacagacatggcaaaggtagcaattaaatccgagaaactcactccttttggaggaatattttcaataatggagcaatttgactccagactctcatctgtaatcgactcaaccctcggtatgagatgcaggctgtatggttatcaatacagcgaaatcatccgttcgcttatgagcgtttatttttgtggcggctcatgcatcgaggatgtcaccactcatctgatgtaccacctttcgcttcatccgacacttcgcacatgcagtgccgacacgattcttagagccataaaggaactgacccaggataacatttcctacacatccgacactggcaagacctacgacttcaacacggcagacaagctgaatacactgctcctcaattgcctattgtccacagggcagctgaaagagggcgaggggtatgacgttgacttcgaccaccagttcatagaggctgagaagtttgatgcgaagcctacatacaagaagttccttggttatcgccctggcgtggcggttattggcaacttgattgtcggcattgagaacagcgacggcaacacaaatgtccgtttccaccagaaggacacgctgaagaggttctttgaaaggtttgaacaaaacaagcttattatcaaccgtttcagagctgattgcggctcgtgttctgaagagatagtggaagagattgctaaacactgcaagaccttctatatccgtgctaaccgatgcagttcgctctacaatgacatctttgccctcagaggttggaagaaagtggaattgggcggcattgagtttgagctggcctccattctcatcgagaaatggaaagggaaggcataccgtcttgtgattcaaagacagaagcggatagacggcgaactcgacctgtgggaaggagaatacacctaccgctgcatccttacaaatgactacgagtcttccgagaaagagattgtcgaattctataacctccgtggagggaaggaacgcatcttcgatgatatgaataacggattcggctggaacaggcttccaaaatcctttatgggagaaaacacggtgtttcttctgcttatggcactcatacgcaacttctataaattcatcatggcgaggcttgacgtgaagaggttcggactcaaagcaacaagccgcatcaagacgtttgtctttaagttcatctctgtgccagccaaatgggtcaggacatcaaggaagtatgtgctgaatatctattcatgcaacaatgcttatgccaatgtgttccagaatgactttggataacaccgacaacttatagtcgtgattttgcgtattgcctcaagtcgcatggtggggtaaggggcatttatatgtctttatggtgacattcgatgcactgtgccccctttttactaacgatgcagattcttttcgcttctgtatcatattaggcgcgtagttgcggatttgaggatgataaaactttcggaggttcattgtaccaacaatatctacaggctatgtcttggctggaaagcaaactgcaagtagcttataaaatagagggagcaggaccaagagaggaaatttgggaaatacctttgaccgtatttaaagaagccattataaacgccctgtcacatcgtgactactatgaacaaggcgcaagcattatgatagaaatgtttgacgaccgggtagagatttccaatcccggaggacttttgcctattgtagctaaaaatttcgggcataaaagcatgacacgtaacccactaatattcgggttatttacccgtatgcacttggtcgaaagagttgcatccggtattcctcgtatgcaagaagccatgagggaagcgaatcttcccgaaccggaatttcacacagaggggatgtttacagctgtatttaaaagaggaattagtatcaaaaatgaaataataaatgtcccaagcttgtcccaagaatgtcctaagctggatatacgttatacatctatagcggaacaaataatttcgtattgctcagaaccccattctattcaagaaataatgaaacttgtaggacaaacaaaccgaagtagatttaaaaaaaatatcataaatccacttttagaagtaggcattctttctatgactatacctaacaaacctaatagtccattacaacaatatatcataaaaaaataaatatatgaatataaatgatttcaataatagaattgcaagatgtgaatcctttttaattgctagtgacgggcaattcttaggaaaactttctcttaatagatacgatatagattccatttcctatgaatatggtttgtatggtagtatctattccgctacttcatttaagaatcagtattcaacttatggtagtccttactcttctttaagcccttataatccatatacatccactccacctaccatatatttaagagggcaacgagttggttttctatcaaagaacaaatacttatttggcagtattgaccctgatagtattaatacttggatgcagaataacggattatattattaaaatatggaaatgatagaatatgtaaagttagtaacagccttcattgtctcaatcggtggttcaagtgttgttattattgcactatctaaatggtttggaaatttcctttcaactagattattagacgcttataataataaacatgaaaaagaattagaagtgataaaaacaaagtatgcttctgaattggaaaatacaaaaaatgaattagagaaagcaaaatcccagtttctcagatattcagagaaacagtttgaattgtataatgatttatggaaagttctactatatacaaaacgacaagctgatttgttatggcaaaaagcagaccctaatcaaataccatctttcagtgaacaaatcaggcttactcgtaatgctattagcgataatcttctattaatagaagaagaacattatgagaaattaattcaacttatagaacaatttgaacaattccaattcggaaaattaaagcttatagatataagaatacaaattgaaggtggagaacaagttcaacaaataatatctaaagcagatgcacaaaacaccatcaataaaaatagaaggacaaaagaaaaatatgacaagttaataatggatataggtaagtcttttagagaacaaataaaaggataatatttgaaattctaatattagttgtatctttgcactcagaaatcgtacccaagatacaaactgatgtcgaacggtgcaaagttgtgaaaaccttattcaagggactaacatcgtgataaagatataacttattgagaaatagtgctatacaaaccgattttcggttgctggtggcaccacttttagagaaagcaaaacgatgtaaatccctgaatttcaaagaagttcagggatttttattttccaagaatagcaaaatagtgggatgaaggggatcagtcagaaaaacgtcttccaacagtaacattcccctaaatcccagaaatcagctatcatatcgaatgctccgatagatacagatctaatttcgttgggcatatcagatattttcacactgttcctgttctcgagtatcataggcagcaaaagtcctattaaatgtttcgaatatcaaatcaaaacttgtattgcccaaagatcttattttcatgtccgctttatacgaattacaaaataaaactttaataaaggattattgcttttcaagacagatattaactgcattcatacctttcgtaccacgctcaagatcaaatgtcacaatgttgttttctacaatattgccaacaacattatttacatggaagaaatacttttcaacaccgttaagatctttaataaagccaaatcccctagcctcattaaaaaattcaacccttcctcttaagatagccggttcttcctcttcctttttgggagttgcaatgattatttcatcgggatttatttcctcttttttaatatcttccgttggaggagtggaagttatcattccgttctcatctacataagcaatcatatcttcaaagctattcgcttttcccgacaattttttgctttctttcttctttaatttttcctctcgtttagcgagtcttttcttttcattttcacgtttacctactgtcatggattttgccatagaaatcatatttaatttatacttatttttaatgaataatgtaagaggctaatttcaaaaagtgaaattagccttattgagtttcttaccggtcaacttctgaatatcattaaccagtttacgttcttcctgcgaacagaatgtaagtgctgtccctgtatttccagctcttcctgtacgaccgatacgatgtacatacgtctcgggaacatccgggagatcataattaataaccataggcaactcacttatatcgattcctctggaagcaatatcagtagcaaccataacccgggttttccccgacttaaaattacccaatgcggactgtcttgccgcctgactcttatttccgtgtatagcctgactaccgatcccagccttacctaatatcttaacaatcttatcggcattatgcttcgtacgcgagaagataagtaccgattgatcttctgctttttgcaaaattgaaattaataattggcttttctctttcttctctacgaagtacacaacctgattgatagagtccacagtagacgatttcggtgttatgtaaatcttcaccggattcttcaacagagatttggttaaagtaacaatggtgtcaggcattgttgccgagaagaacaaggtttgcttttctttcggaagtttcggcaatattcgcttaatatcatggataaatcccatgtcaagcatacggtcagcctcatccaatacaaaatactgaatagtatccagatgtatatgtccctgatccatcaaatcaagtagacgtcccggagtagctaccagaatatcaattcccttgcgtaacatatcaacctgcggacgttgatttacaccaccgaagatcactccgtgacgaacacgggtatattttgaataatcgtcaatgcattcactgatttgcagggcaagttcacgggtaggtgtcaatatcaaggctttgataccctgacgcttgacagattccttgctcacgacttgcaaatgttgtatgataggaatggcaaatgaagccgtctttcctgtaccagtctgcgcacaacctaatatatctctttttgccaatgcggcaggaatcgctttttcttgaattggggtcggtactgtatatcctttttctttgattgcttttaaaatcggctcggttatatttaattctttaaatgtcataaatgttgtttttactatatctgaaagtaaaccgtcagaaacatatcttatataaatgttcacgacgaagtcaatattgatatagacttgtgattatacttattaaactttgctcttttttccagaggcttgcttgtattacaaaaaagtctaataaatctattttcagaatggaaagtgcagaactagaaatttccgatattgcacacaaaagaggcagaattagcagaacttaaatgtaaaatgatttttcgaattctctgtaaaagggatttcacgatgaatcatgaaacggaaataatttatatataaaagcagaagacagaatcttctgcttttatccgggtattaatatcttctggagttattataaccaccacgaccaccaccgtgagacggtctttcagtgcgagggcgtgcaacgcttactgaaataaccttctggtcatattcaacgccattcaattcgtcaattgctttttgtccttctgtatcattcggcatttctacgaaagcaaatcctctggatctaccagattctctatcaaaaataaccttagcagaagatacttctccaaactctgcaaataaatttgttaagtcagcatcatttgtgccataacttaaacctgaaatgtaaatgttcatctaaaaattttattaaaataaatactattttggagtgaggaggataattacagaagaggactacttgctaataatatattaaaaagaagaactacacaataataattcgtaactcaaactctgggaacaaagataatgtaataaatcagaaaaatacgtttatattcattctttttcggaagaaagacgataattatcatttattagcacaccattcaccctaaatcggtgaaatacacaatttcgtctctcattcttgatattctctcgcaatatatctacttttgtctttgtataacttattaaggggcacctcatgaatgtcagaatagaacaaagttggaaacagcaattacaagaagaatttgataaaccatacttcgaaaagttggttacattcgtcaaagatgaatataaacgggcacacgtcctccctctcggacatcagatttttcatatattcaattcctgtcccttcgaaaaagtaaaagtagttatccttggacaagacccttatcccaatcccggacaatattacggagtctgtttttctgtacctgagggagtagctatccccggttcactaaacaacatattcaaagagatacatcaagacctgggaaaaccaattcctgcttccggtaacctggatcgctgggttgcccaaggcgtattcccgctaaactctgttcttaccgtacgagcgcacgaaaccggttctcatcgaaatatgggctgggaaatcttcacagacgcagttatcaggaaacttagtgaaaagcgagagaatctgatattcatgctttggggaaattatgcgaaagagaaactatctttgatagatactagcaaacatctggtactgaccagcgttcatccttctccccgttctgccgaatatggtttcttcggttgcaaacacttcagcaaagccaatgcctttttgcgtagtaagggaatagaagaaattgattggtaaataaatatcttctcaaaatatactatcaacgttcaaaacattcaccatgaataaatcaaacgatattacccgggaagaatgtggaccaaacaatgcctttttgctactgacattgattacaccatgttgaaacgggatatctgcccctcaaacagcggaacgactattccaacatttacagtttccgtatactcaatgccaggcaacaatatatacgtgtcaccagccgacatcaagttttgaagcaagaccataacggcaaagcatggctcgtaataggtaaccgtgaatatgtattcaaggcttcttccaaacttacatattttcctaccgttgtaaaattaaacaccataagaacaataaagatatgacgattccatactaaacccgaaatatttttattacattcacagcatgaaatgcagaattatactcgaactattagcaattctcttttttacaggatgttataacagagaacagatttcccggcttgacgaggcggaagcactgatacaaaataagccggatagtgccttaacaatattacaacaactcaaatcggaaggtagccaggctgaacaggccaagtatgcgttgctttattcagaggctttagacaagaatcatatcaaagcaacaaatgattcgctgattcgtcgggcttgggagtattacaaacatcatcccaaagatttacgccgtcaatgcaaaaccctctattattggggaaaagtcaaactgcgtacaggagacaagccgggagcgttacgcctttatctgaaagttgaagagaaactgaaagataccaatgagccttattatgcggggcttttatacagtcaaatcggtgaagtgtattatgaccagatgaactatagccgggcttatcattattttcgtgaagctcgcaataacttccggcagtctgataacactcgcgaagaaacagaagcaactctcgatatggcagccgcaactttcaattcgaaagatatggagaaagccatgcggctctattctgccgcactcgatttggccgatgaacacaagtacgataagttagccaaagccagtctcaccaatcttgcttctctctatgtagtgtcaggcaagaaacaaattcctcatgacctgctgcaacgtatcgaactttctgcccggcaagatacgctctacggatatcatacgttagtagatgtgaatctactgaaaaaccgtatagacagcgcacgctactatctggcacttgcagaagcacattctaccgatattcgtgacatcgcagacctgcaatacaccgcttatcggattgaagcgcaggccagaaacttcgagaaagcaactgagaagatacatcattatatctatctgactgactctctgacacgctcgaatatgcaattctccgctggtatggtggaacgtgactatttcaaggaacgctccaattttgccgaataccggatgaagaaccgtactatttgggagattgccgtagcaagcgtaatttttctgatattaggggtagcatactatatcatccgtcaacgtctgcgcctgcaacgcgaacgtaccgaccactacctgctattggcggaagaagccaactcccaatacaaaaccctgacggaacacatggaaggacagcgcaatgcggaaaaccatttaaaaggtttgatagcttcacgctttgacgtcattgacaaactgggaaagacttactatgaacgtgagaacactgcatcacaacaggctgccatgttccacgaagtgaaacagattatcaccgattttgcagagaacaatgaactgttgcaagagctggaacttatcgtaaatacctgccatgataatgctatggagaagctgcggaatgattttccggcaatgaaagaagccgacatacggctgctttgttatatttttgtaggtttctcgccacaagtaatcagtttatttatcctcaaatccgcaactacgcgcctaatatgatacagaagcgaaaagaatctgcatcgttagtaaaaagggggcacagtgcatcgaatgtcaccataaagacatataaatgccccttaccccaccatgcgacttgaggcaatacgcaaaatcacgactataagttgtcggtgttatccaaagtcattctggaacacattggcataagcattgttgcatgaatagatattcagcacatacttccttgatgtcctgacccatttggctggcacagagatgaacttaaagacaaacgtcttgatgcggcttgttgctttgagtccgaacctcttcacgtcaagcctcgccatgatgaatttatagaagttgcgtatgagtgccataagcagaagaaacaccgtgttttctcccataaaggattttggaagcctgttccagccgaatccgttattcatatcatcgaagatgcgttccttccctccacggaggttatagaattcgacaatctctttctcggaagactcgtagtcatttgtaaggatgcagcggtaggtgtattctccttcccacaggtcgagttcgccgtctatccgcttctgtctttgaatcacaagacggtatgccttccctttccatttctcgatgagaatggaggccagctcaaactcaatgccgcccaattccactttcttccaacctctgagggcaaagatgtcattgtagagcgaactgcatcggttagcacggatatagaaggtcttgcagtgtttagcaatctcttccactatctcttcagaacacgagccgcaatcagctctgaaacggttgataataagcttgttttgttcaaacctttcaaagaacctcttcagcgtgtccttctggtggaaacggacatttgtgttgccgtcgctgttctcaatgccgacaatcaagttgccaataaccgccacgccagggcgataaccaaggaacttcttgtatgtaggcttcgcatcaaacttctcagcctctatgaactggtggtcgaagtcaacgtcatacccctcgccctctttcagctgccctgtggacaataggcaattgaggagcagtgtattcagcttgtctgccgtgttgaagtcgtaggtcttgccagtgtcggatgtgtaggaaatgttatcctgggtcagttcctttatggctctaagaatcgtgtcggcactgcatgtgcgaagtgtcggatgaagcgaaaggtggtacatcagatgagtggtgacatcctcgatgcatgagccgccacaaaaataaacgctcataagcgaacggatgatttcgctgtattgataaccatacagcctgcatctcataccgagggttgagtcgattacagatgagagtctggagtcaaattgctccattattgaaaatattcctccaaaaggagtgagtttctcggatttaattgctacctttgccatgtctgtcgggtttgatacatattttgatttgcaacactaagataggtgaaaaatctgacatggcaaattcctgagcaactttttgttgctcaggtacttaaaaagttatatttgtaatagtgttgcggaattaaggtttatgaaagatacggtagctaatgtatatgctcgcaagtcacggctcaaatcacgtatcaaatcggcagaaacagccaataaggagttgtttttagcacttttcggataggtgttagacctgtgttagaaatcttagaacacatcttatacaactcattgaatatcagaacactttaaattaaaatgttagatttgtaagattgcatcataacccaaatttgatacaatcttactacttttgtattcgaaaaattagaaaaaagaaaagattatgaagaagattgttattctattaagcgtcatgcttttcatagtagcatgcgaaaaaggaaacgaagaaatgaaagaagcaaaagtagtggtagccgtttatgatgagaatggaaaaattgcaacgggcgttcccgtaaaaatgtataatgaaaaggattataagatttttgaaaaagataatttaaccttgccaactgcaattgcccagacaaacgaaagtggcatagtaacctttgtattgccacgagaggaatggttcacaacgcagtcgcaacggttcctgacattcgtggtacaagaagggggtggccctgacaactaccagatatggtcttccggcaaaaccgtagaagccggaaaagtcgtaaaggtagacatacgtttaacccaattccctaactaaacttttatcatatgaaacaaactagaccttatataattacagcactttgcttgcaaatggttctgggagcaatattattaagttgcagcaccgaaaatgacgaatataagaaagattcaccttcggcagaaaatcctgctgaacccgtaggagctttactagaggatttctccatagaacaattacccgcaaaaacgatttatgcattaggagagaatatagacttaaccggccttaacgtgacaggcaagtatgatgacgggaaacaacgacctgtgaaggttaccccggaacagctcagtggtttctcatcatctgcccctgttgataaacaggaagtaaccataacgatagagggtaaacagaaaagtttctccgtgcagatttctcctgtccgtgtagaaaatggagtattgacggaagtattgaaagggcataatgaaatcatacttcccaatagtgtgaagtcaattccaaaagctgctttcagaggtagtcaaataaacaaggtggtgctcaacgaagggctgcaatctatcggagatatggctttcttcaattcaaccgttcaggaagttgtattcccgacgactctggaacaacttgaggaaaatattttctactattgccggaacttgaaaaaagcagatctaagccggacgaaactcaccaaacttcctgccagcacttttgtatatgcgggcgttgaagaggtgctgctgcctgcgaccctgagagaaatcggagcacaggcattccttaagacgtctcaattgaaaacgattgagattccggagaatgtaagaacaatcggattggaagcattccgggaaagtggcattaccactgtgaaattaccgaatggcgttacaaccatagcgcaaagagccttttattactgcccggaattgacggaagtgaccacctacggaactgttctcaatgaagattccgaagctatgattcacccctactgccttgaaggatgtccgaaattaactcgctttgaaatttctaaaagtatccggattttgggacaaggactattgggcggtaatagaaaagtgactcaattaaccattccggcaaacgtcacacagattaatttttcagctttcaataatacaggtattaaggaagtaatggtagaagggataacacctccacaggtatttgaaaaagtatggtacggatttccggacgatatcacagtcattcgtgttcctgccgaatctgtggagaaatacaagaatgcaaatggttggaaggatttcacaaacaaaataacagcattttaataattctctgatttttcgattataaccgaaaaaagttggttttatgtcaacttttccggttataatcgaaaatttcattttatcaggtcatgtattaaatctccccattcacccctaagccgaacaaggcgaaatcgcccaggcaagggtcatccgggaaaacctcagccaatgctgccgttatctgacgggcatttttcaaagagaaggtttctgtatccgtcaacttgaaataatgggctacccggcagacgtgtgtatccaaaggaacaatcagttctttgcggtcaaagctcttccaaattccaaaatcaactgccgaatcccggcgaatcatccaacgcaaaaacatattgagtttcttttgaggacttttagcggatacttcaaggaatgagcacaacttttccataggtatccctgagtacgcattcaaagtttcttccaagctttcaaactgtgtataggctgcatataatcgccggaagtatccataaaagtcggcatatgacagcatacgataaaagctattggttactcccgaagggaaatcgacctcccactggcgggacagcacatactgataaggcgaatctcccatcagcctgtgcagttcgtctgctttcttcaatatctgtttgcgattgccgaaactcataatcgcggtcaacaagccactgatttcaatatcctgtttcagcgtatagcgatgagggaattgtaccgggtcgcttgtaataaagtctgcgcaatggtaaatctccgcacacatcaaaagtttattctttatatcttcagtcattttgagaatgtatctagtattgaaagtgcaaacagaactatcaatgaaagtcccacggcataacccaatttaagaactttacggcagacggaaagttgcctgtcggatagctgaatagccttattaaaaaagtatgctatttgttgagtgcagctatatacagagtttcataaatagatgaatatcgttagtttatcaatcaattacaattacgctacaaagatagcaaatcttacttcatatcccaatgtggtacggtattggcagattatttatagtaaggaaatactttaaaggtattaattacaagattaataaattgatttataaagatataccctattccaaagcaaaagaatgatgctatccaatcattcccttttgaaaaaaggcatatcattttgaaaagagtaacaaccaataaataaccagacaacgatgaaagtttgcaaatttgaaaaaattaaagatgaagatgatatcaagcaagttatcaactgtatccggcaggaacacccttatgtagccgtacttcctgtattgacacagttgcaagaatggatgcaggctatctccgccagttggttccacgaagaagacgaagtttctcataccacagttaatgctatcgaagaatattgttatagcctgaccaatcatctcatcacagaaccgcaattgaatcaggatatgaaaatccgtatccgggagtgcataaagaagatacatgcattggtagaggacaaagctgatttactgattgataaaacaataaaagctgaaatatacggactgtccagtgatttattcacttacagcttgcgccaacagggatttcgtgcccaaacgctggatgccggtaaatttatgcaaatcaacctggaaagaaaaccggatatcccctatatccaggaaactgtccgtcaatatattgacgaaaaccaagatgtcgacatttttgtcgccccgctctctatctgtaagaatgtatatggtgaaatagacttcatgagcgaaaggcgtaacgactactacgcaacagtactcgctaccatttttcaagcggacgaaatagtcttatccacccaaatcaatcatatctatgcaaaccggaactgccggagagagcagcactcactgacctatacggaagccgaacaactgattaacagcggagtttacctactctacacagactgcatcacccttgcggcacgctccaacatggctatccgcctgacagatatccacgacctgacaaccgaacggctctatatctcctctcatgacacaggagacagtgtcaaagcaatactttcgcaggactcggccacctttgtacgctttacgtcattaaacgtattgcccggctatctgctaatggggaaactactggaagtcatcaacaaatatcaaataaacgtcgtttcaatggcctcatccaacgtatctatctccatgatgctgacagccagcagtgataccctgcgaatagtccaaagggaactgcataagtatgccgaaatggtcatagacgaaaatatgtccgtgatacacatcatcggctcacttcactggaaacgcacccaggtagaaagccacatcatggacactatcaaggacattcccgtatctctcatttcttatgggggaagcgaccactgcttcacgttatctgtgcacaccacagataaaaacaagcttatcaactcactgtccagacaattcttcggcaaccagtgcgcagcctgacccgaaaaaaaataccggggagcagatttatccactccccggcattttttcttttcacttttatacatacgtattgacattttattaccaacaagctaataaaacttcaatgacgttcatttacaaaatccatactatccaaaactgaaaggaaaggcgctttcatcggataaagcaatcaatccattttttcgttgaatacaaattttgttctctcttgccagccaaccagcagccaatgctgtactctctacgctaaggtttaatcttctcgccaattctggtattgaaatttcaccaatttcctttagggcacaccagacctttccggcgttcgtccctactattcttttatccatggctattatttatttaataatttggttacaatatagcgattttagtaatagattataaccaaaagagcgttttttatttcaggttttgacattatttaaaacattaaaatccatatcaccgcaaacggttaaaaatatggtcattttatatacatttataccatacttaaatacacgaaatattaaaataaattatcaaacgaagaaatagaaaagcatcgtcaacaaatagatattctacaaataagcaatatcggacaagtctgttcccttttttaccagtacctttgcaaagtgaaataccaaaagaagttatgcaacagaagaaaacaacgaaagaagagtatcaaaagtgcgtaaatgtcgtagtggaatatatcaatcagcatttaggagaagagattgatttaaaatcgctggccaaggtttctaatttctctcctttttactttcaccggataatgaaagcatttctcggtgaaccgattggtacgtttattgtccggacgcggacagaagctgccgcacgcctgctccgttactcggatatcccgattgccgatattgcctatcgcatcggatattcgtccccttcttcattgtcgaaagtattcaggcagttttatgggatttcacctttagagtatcgaaacaataaaaactttgtaattatgaaaccagcgattatcagaccggaattggaactgaaaagtgagattaaaaatgtacctgcaagaaatgtgatttatatccgcctgtccggcgactacaaactgaatgattatggcggcacctggggacggttgtggcagtttgtcaaagaacaaaacctgccaataggggatttcagcccgctttgcatctatcacgacgaccccaaagtgacacctgccgagaagttgcgtacagatgtatgcatggtaatgcctgttcaggtagcgcctaaaggcgacgtaggattcaagacgcttcctgccggacgttatgccattttcctttataaagggtcgtatgacaatctgcaagcagtgtatgatactatttacggaaaatatctgcctgaaatggaatgtacgttgcgcgacgaagccagtgccgaacgttatctgaacgacccgtgcaaaacggctcccgaagagttgctgacggagatttatattcccgtggaataaaatgaagtaagaagaataaaatgcaggtgtgccgtttcgtcttggcacacctgcattaacttactcattccattcccgatgaatgagaattacgacatacagataatcttcctctcctcggaaacaggagtgataatttgaatgtattgtaaaaatgggacattcttttatttaaagaaaaccatttgcgcgattgaaagcatagtttcgtccaacatgctttcgccggtgaagttccaagaaatccggttatcataagaatcgagcacaagccaattgaaagaagcggcactgaaataaccaactccgcagaaaagcacccaggccgtttttctatctgtcggttcgcccacctcacatcgtatgcggaatatccagtgatccatcgcatacagagacggattcagttcgagtcccgtctgcaccagattccccgaataaatttctcttgaagacatttcctctgatgaaatatccagtaaggaaacgaccagattatccgacagagttgtgaaaccggcacttttcagttcgataggtgaatcatcattaatccggtctacgaatatctggctacttgtacacatcactacatagtccaccgtatgagaagaaatagcttgcgaaattttttcattcagccgaaacagacttttttcgtacctcgatgcacttagggaattcactgcgttcagttcttcaaggtcggaattcgtgatgtaagacagaacggtgcttttcttgttcggattaatgtaatacttctgacccggttcgctgatatctacgaatttattcaggacatgaacatcggactcgtaagaattacccgcctcggcaggagtgtcaataacaaagctgtcgctacatccacataacaggacgagaaaaagtaaaaagcctagtttagttaattgcagattcttcataacatacagggtttggttatcttttcctatttcataaaatagtttagtcttatggcagcaaagttatgggaaagaaaataaaaaagtcttgaacgaattcaagactgcagctgatttatataggatataaatattattaacaataattcccgctatcgtgccaatggtggcaggatagcaggaaactttttctttagataacggaaagcccgtattcgtaggcatcggacattgcattgtaatctgcgtccgagtaagcgcctttatctctggctttctgcatatccttcataaaggattctacggaagagaggaaactctgatagtttttcaattcttcgtcataaccagtaacggcaggaagtttctttgcggcttccagttcctttttcaattctgccattttcacgtcaatccgcataccgtccattacgtgtttacgggagtagaggttcatgatactttgtacggtgcccgacattttacgcatagccattatctggtctttcaacggctcgtcggcgagaagttccttttccgcctgttcagtcagagggcttaatatatcgaaaatcacttgtttgtattcggacatcgctatgctcaactgatagttctcttccaaaagtttagtggtttccgcctttttgttatccttccggtaagacaggaatttatcaaagttagcgtagaaccgtgctctcgaagtaaataatcccctgtaattctgtatcagattctgacggacttcatcattgaagtagacacccggattcattagttccgcagtatccctgaccgagacttccggtggcgcaatcggagctacttcgggcacttttcctgtctgctccatatatcccaataccgcatttatatcttttgcattagctacatgcctcaaaacaatgagtgatgtatgataatagtttatcactttactggcgtcatccaactcttcaggagtagccgaagacgcaacctgcttcttgttccctcccgaacaagaaaccaacaagaaagcacctacaagtgcccctaacaacaagattcttttcttcataatgttcagtttattaagtctttcgtactataacaataaaaatcgttttttgttataaccaaacaatacatatcggataagttaaaaaagaacaggaaagtcccagatattatcgacaatgattaaggaataaacaatcaaaaaggtataaaaacaaaaaatggctactcatcgcgagcaaccaatcttttgttaaccttaaatctaatacttatgaaaaaaacacagtacaaaggtactaacttccacataaatagcaaatttcagctcccaaacaagcaataatataacacggtttaatactcgccgaatcgcattaacatttcagactttacacgttaacatttaacatattcattcacaatccgggaaacgaaaagcctgaagaataaccaacactcgttattttcaatgttcgctcaaatttaagggcataaaaaaaggctatctatcccagacagccaatcttttgttaaccttaaatctaatactatgaaaaacacagtacaaagatacggactttcggcttatctccaaatttatcgggcaaaacggggtatcttataacatggtttaatagaatcggaatccgattaacatataaacagaacaacgttaacatttaacagttttcttaaatatataggagcgaaaaactaagagagatgcaaaagttttcaaactggttatcgaatcttattaaagagagtttaaggtaagtaacaaatcctccacccgcttgtttaggatagaaggtaaccatcaaattctcattatatgaatagattcgaaaataaggcagtcatcatcaccggtgctgccggcggcattggcgaagcaaccacacgccgtattgtttctgaaggcggtaaagtagtcattgccgaccactccaaagaaaaagcggagcaacttgctgccgaactcactcaatcgggggctgacgtacgtcccatttatttctccgctaccgaactgcaaagctgcaaagagctgattgactttgcaatgaaagagtacggacaagtggacatattgattaacaacgtaggcggaaccgacccaaaacgtgacttgggtatcgaggaactggatattaactacttcgatgaagtatttcacctgaacctctgctgcaccatgtatctctcccaacaagtgattcctatcatggtggcgcacggcggcggaaatatcgtaaacgtggcatctatcagcggaatgactgccgacgccaacggaactttatacggagccagcaaagcaggtgtcatcaacctgactaaatatatcgccacccaactgggcaagaagaatatccgttgcaacgccgtagcacccggactgatactgactcccgccgctctggataatctgaatgaggacgtccgcaacatctttttgggacaatgcgccacgccttatttgggtgaaccggaagatgtggcagctaccattgcctttctcgcctcgaatgacgcccggtatatcaccggacaaacaatcgtcgtagacggcggactgaccactcataatccaaccgtggaattatcataaaacaatatcgaacggtacatcgcacgcctcaagtagttaagtacaaacggacagcctgccccgtctatgcagcaaagatgattttaactttcggtgataaggtatttgcagctaagtcaatcggatatagcagcccggagggaaactacggaaatataacagaggacacttctttgcccacaactgcactacatatcattaaaaacataatgatatatatccaataacaggattacatatatcatcaaaattaaactttgctgtgccacacttctaccaccccgttggcacagtcgtgccatgcctatgtcacagttgtgacagcacgttggcactgttgtgacaatggggtggcacaagcatagcgtttgacggtatccgaacagcatatattaatctacattatactcattatgaaaaagccaacattcatctttattctgttatccttcgtcacaatgtataccaacagacagataacaaatatcattaaaagaaagaaatatcgacaatcaaacaatagtttcgttcaacaaatactaactttacaacgtttttaatataaagaacggacggcatgattgttagaacgctactggatacagatctctataagtttaccacatcgtacgcttatatcaaactatttccctatgcaatggggaaattcagcttccatgatagaaatgagactgaatatactgaagaatttctggaaagacttaaaaatgaaattgataagctaaaccgattgagacttacagaagaagaactggaatacatgacacgaaattgccggttccttccgagagtttattgggaatggctatcatctttccgctttcatccggataaaatcaagatacatttggacgaagcacatcatcttcacatcgaagtcagtgatttcctctataaagctaccctgtatgaagtacctttacttgccattgtatccgaaataaagaaccagttcttcggcaatgtagccgatatggacgaaatcttatgcaaattatcggagaaagtggaactgtccaatcaacatcggttacgtttctcggagttcggtacgcggcggagattttctgtccatgtacaggaaacggttatcagaaaattaaaagaaacggcgcagtattgcacaggcacttccaactgctattttgcaatgaagtacgacatgaaaatgatgggtactcacccgcatgagtggttcatgtttcatggagcgcaattcggatataaacacgccaactacatggcgctcgaaaactgggtgaatgtttatgacggtgatttgggcattgccttatccgatacttatacttccggtatcttcctcagcaatctcagccgcaaacaggcgaaactgtttgacggtgtccgctgcgattccggcaacgaattcaggtttatagacagtctgatatcccgttacaaagaactgggaattgacgcgactaccaagactatcgttttcagcaatgccctcgatttcacaaaagcactggagattcaggaatattgcaggaacaaaatccgctgttccttcggcatcgggacaaatctcaccaatgacaccggattcgaaccttcaaacatcgttatgaaactgacacaatgcaagatgaacgtcaatcaggaatggcgggaatgtatcaagctatccgacgacgaaggtaaacataccggtagtccggaagaagtacaggcatgtctgtatgaattgagactgaattagcttatttccctgctatcgctttatcaaaacggctatccatacaagcactgatatccgttgtgacaaactttccttcataaaacaagctgaatatcgtagccggagtaggtgcagcctgtacctgctccattgtctccagttttataatcgtcaaaggaagatttcttttggcggcggtttccttcaaagaactcatcacatgaaattctgcaaacggacaacggttggagaaataaacagtgataccctttttatcagggcactctcctgttcgtgcagattcattaaacgtcggattcggagcatcaacattcaatttcttcactaacagactaaatccagtcggaagctgttcgcaagcaacaaatccttgtctcaacagccatttggtatcactcataaaatgaaacttctttgttcctaccacagtcaccaaaccgtccttgccttgctgcaaggcatcatctatcgcagtttggagcagagctttcgcatacccttttcctttatattgcccggctacccaaaagcagtttatcaacagataattatcagccttcacaggaacccatccgttttcggccggaccatattcgataaatactttcgcacgctcattcaaacggcgaaaaacatacccgttttcaaattgcctcttcagccattcctttttcaggttataactttcctgacatttcttatccgagaaagcgcagcagatatgttctttttctatattgtctttggtaagcgtgataaagtcgatgttcatggtaacttgtttttttattaaatcaatattatttagtgggaagtgaggtacgaacataaaaaaaggagcaacgccttgctccaacctttgttaaccttaaatctaatactatgaaaaacacattgcaaagatacggactttccggttatctgcaaattatccaaataaaaaagtatgtttcataacatgatttaaaactttctgagaaatagcacttgttttattaatactttttcaagatttgaatcccttcacggctctttccagtctttccaaagtcagttcgccggattgccgccaaagttgttgtccttttcttaaaaggataaatgtaggcgttgcttcgatggtgtagaaatccgtaagggcagtttcctggtctacatctacttccaccacttcgatcgtgccttccattaatttcttaaattcctcaacaacaggtttcatacgctggcaatgaggacaccatgttgcataaaattccgccattacccaatcggcattagccagcttctcttgattccgttcctcacgggctgctttcttctctttcataattgattactgtttgattaataattgctacttcaacaatgcgaaaagaaagaaagtttaaagggtaaacaataatacacacagatttaactattaaatccacttacatttaccttatttcgtttctgatatccgaacaagcgtccattgcacaaaaaagcaactttcgtgcaaaaagagaacactctattcaaaatttatttatctttgccgccgaaatggttcggaatccgtagccaacggacgacgattaatagggaatcgggtgcaaatcccgaacagtcccgctgctgtgaagctcagttcaatgtcttataaatgaactaatttgatgccactgatgttctatcgggaaggcaaataagacaagagtcagtcagaagacctgccacttcacgtaaaacgttcttccgcctcgtggattaggagaaaggacatcgtttgttaagccccaaatcaggaaaatactgtgttttcatcaggtggagtatgtccgcaaggtgggaagacacaaaataagtatgtacttaatttagaaaagtatgataaaaagaatcttagtagccaatcgcggtgagatagccgtgagggtgatgcgctcctgccgggagatggaaataacgagtatcgcgatattttccgaggcagaccggactgcaaagcatgtgctctacgcagacgaagcatattgtgtaggtccctccgcatctaaagagagttatctgaatatagaaaaaatcatcgaagtggcgaaagcgaaccacgcagacgccattcatccgggatatggattcctgtccgagaatgcggcttttgcacgacgctgtcaggaagaaggcattatctttatcggtcccaatccggaaacaatggaagcaatgggcgacaagatttccgcccgcatcaaaatgattgaagccggagtgcccgttgtgcccggcacacaagaaaacctgaaaagtgtggaagaagctgtggagctttgcaataaaatcggttatccggtgatgctgaaagcctctatgggtggcggtggaaaagggatgcgccttatccacagtgcagaagaagtggaagaggcctatacaaccgccaaaagcgaatctctttcttctttcggtgacgatacggtttatctggagaagttcgtggaagagccccatcacatcgagtttcagattctgggtgacaaacacggaaacgtaattcacctttgcgaacgcgaatgttccgtgcaacgccgcaatcagaagattgtggaagaaactccttcggttttcgtcactccggaattgcggaaagatatgggagaaaaagcggtggctgccgccaaagccgtcaattatatcggtgcgggaacgatcgagtttctggtagacaagcaccgcaactattacttcctcgaaatgaatacccgcctgcaagtggaacatcccattacggaagaagtaatcggcgtagacctcgtaaaagagcagattaaggtagccgacggacaagttctccaactgaaacaggaagatatcaaacagcgcggacacgctatcgaatgccgtatctgtgccgaagatacagaaatgaatttcatgccgagtccgggaatcatcaagcagattacagaaccgaacggtatcggagtgcgtatcgacagctatgtgtacgaaggatacgagattccgatctattatgacccgatgattggcaaactgattgtgtgggcaactaaccgcgaatatgctatcgaacggatgcgtcgcgtgcttcatgagtacaagctgaccggagtcaagaataatatcagttacctgcgtgctattatggatacgcccgatttcgtagaaggtcattatgataccggattcatcgccaagaacggcgaacacctgcatcagtgtatcatgcgaaccagcgaacgtgccgagaatattgcactgattgccgcctacatggattatctgatgaatcttgaagagaacagcggcgacgctaccgacaaccgtcctatcagcaaatggaaagaattcggattgcataaaggcgtacttcgtatctaattaaaaaaagcagttaattatggaaattcatataggtgaccgggtggccgaagtggaactggtcagcaaggaagataataaagtggtacttaccattgacggaaagccgtttgaagcggacgtggtaatggcagaaaacggaacctgcaacatccttatggacggtcgcagcgcaaacgcgcagctcatccgcaaggagaacgggaaaagctataaagtgaacacgcattacagcagtttcaatgttgaaatcgtagacagccaagcgaagtacctgcgtatgcgcaaaaaaggtgaggacgaacagaacgaccgcatcacttctcccatgccgggaaaagtagtaaaaattcccgtaacggcaggacaggaagtaaaagcgggagacaccgctatcgttatcgaagccatgaagatgcagagcaactataaagtgacttcggattgccgtatcaaagaaattctggttcaggaaggcgataacatcaccggtgaccagacattaataacattagaaccgattgcataacactaaaaaacggattgcatcatggaagaaataaacaaagcatatgccacgttccgggaacgtgaccgcatcgcttccctcggcgggggcgttgagaagatagagaaacaacacgaaagcggcaagatgactgcacgcgaacgtatcgagatgttgctcgataaagggacatttgttgaactggacaaactaatggttcaccgttgcactaactacggcatggacaagaacaagattccgggagacggtatcgtatccggctacggaaagattgacggtcgccaggtattcgtttacgcctatgacttcaccgtttacggcggttcactgtccgcttccaacgcgaaaaagattgtgaaggtgcaacagttggctttaaagaacggtgctccgattatcgcattgaacgattcaggcggtgcacgcatacaggaaggtattgaaagcctttcgggatatgccgacattttttatcagaacacaatggcaagcggcgtgattcctcaaatctccgccattctcggtccctgtgccggtggtgcctgctactctcccgccctcacggactttatctttatggtgaaagaaaagagccacatgtttgtgacggggcctgacgtagtgaagaccgttatccacgaggaagtaagcaaggaagaactgggtggtgccatgactcacagcagcaaaagcggagtgactcattttatgtgtaacaccgaagaagaactgttgatgagtatccgcgaactgctttcgttcctgccgcagaataatatggacgaaactaaaaagcagaactgcacggatgaaaccaaccgtgaagacgccgttttggacactatcgttccggcagacccgaatgttccttatgatatgaaagatatcatcgagcgagtggtagacaacggctatttctttgaagttatgccgaattttgccaagaatatcctcattggttttgcacgtctggcaggtcgttcggtaggtatcgtcgccaatcagcctgcctaccttgccggagtgctcgatattgatgccagcgacaaggcgagccgtttcatccgtttctgcgactgtttcaacattccgttgattactttcgaagatgttccgggcttccttccgggatacacgcaggaaaataacggtatcatccgccacggcgcgaaaatcgtttatgcattcgcggaagctaccgttcccaaactgaccgttatcacccgtaaggcttacggcggtgcatacattgtgatgaactccaagcagacaggcgcagacgtaaactttgcctatccaagcgcggaaatcgcagtaatgggggcagaaggcgcggtaaatatcctgttccgcaaagcggatgcagagactaaggcgaaagaactggaagcctacaaggaaaagttcgccactccgtatcaggctgccgagctgggattcatcgacgaaatcatctatccgagacaaacccgtaaacgtctgattcaggcattggaaatgacagaaaacaagatgcagacgaatccacctaaaaagcatggaaatatgcccttataacaactagataggtacttgtcaaagtaccaccaccaaaaacggacttacacaaattctgaagaatgtcattctgagagtctacgtaagtccgtttttttattacattaaataaggagtgagatacttcaccaggaaataaccgcctactaccagccaaatataaagaagaaatgccaggacaaaaggtttcgcccccgcttttctgaacttgtcaatgcttgtttctgtcccaagtgcagtcatagccattgtcagcaggaaagtatccagtgtattgatccccgcaaccaactgcgcaggcagcaaatcaaaagagttaaaagcgataactcccataaagccgattgcaaaccagggaatggcaatcttctgaaatttctgccctttctgtacttgtttctttctcgctcttgccaccatataagtagtaatcaaaagcaccggaaccagcatcatcacccgaatcatcttcactattattgccgaatccgaaataccgtttcccattgcgtcacccgctcccaccacatgagccacttcatgaagagtagaacctgtatagattcccatttggtcgggagtgagcgcacaaattccattacggtagaggaaaggatataaaaacatagagatagtaccgaagattaccacggtagaaacggacactgccgtcttataaggttttgctttaatagtagactccgcaccgagaatggcggcagccccgcaaataccacttccgatagaagtgagcaacgcaatacccctgtccattttcaataacttaccgagataaataccaccacaaatagtcaccaccacaataataacatcaatcaacatagcaggcaatccgatagccagcacatcctgaaaagtcaatctgaaaccatagaggataataccgatacgcagaatctttttcgaacagaactgtatgcccggcacccaagtttcgggaagattattccgcaagctgttagcataaagcatacccaaaatgatacctacaatcatcggactgaaagagagacttctcacgaaagacatctcaccaatgtaaaacgccgcacaagagaacagtgctatcaacaagacaccgtgcaacatgctgcttcttttttcgttgaacataaattactagattttagtgatactgaatttattactctgtttattactctgtttattactctgcaaaggaagccatttttcatcaaaccggttcacagtatttttttataccggataatctccggttatacctatccataataaaaaacggtacctcgattcacatcgcagcaccgtcacaacacaaacacaaaataaaacacgacaaaactactatgcaatcttcctgttatgccggggaggcatatcttgcttgacttatctatattcacatacccataagaagctttatcaggcgatttgcataataaaaaacagactaatccagattttgttcacagaagtttaaagaaaatgaggcaggaacgggattttaacaaggaaaacagcaaccacacctctttattccaacaaacaaagacagcacaaaacaataatcagttcttcttattctcttccttaaatcgggtaggtgccattcccttgatctgcttaaaggaagtactaaaataccgaggataagaaaaaccgacctcataggatatttcattaatgttcatattagtatttgtaagcagaaaaaccgacttctcaatacgcaaccgattaatataatcattaactcccaaaccggtcaggaacttcaccttattatataaagaagctctgctcatagccaacttgtccgtcaggaatttaatagaaagttctccacccgccatgttctcatggataagcatattgagtttattgagaaattcttcatcttccttgctgtttttcgcttgagtttgttgcccagtttcctccagtcggctatcatcctcttttgatgagatatcagacaaaggagtttctgcacagttatcttcttcacctcgctgtttttcttctttactactgagcatatcgtttaatacggcttgctggaaatagtttacattacctttcatattgcgttctttccgacgataatgaatataacctatgcttgcagtcataataataaacaacacagcagctacaccaataaaccaaactgttttataccaaggaggagtgacgataatatgtatcaattgtttagacggagttcggtttccattctttgtattgcacgaaacccatattgaataattgcctgccgacaaagaagacaagttcaacaccggatcataagattcaatagactgcttacctctgccttcaatagtatattgtaataggtatttctgaaacacatctctgttcttgatccggaagtgaacagaaagagaattataattccatggtatttttattgtgttttcctttaccttcttcaaagaagggctaccattaaaaagaatttcggacagatatatttccggaatttgagtttcggtataaggaatatccgtattaattttaactaacccttccgaacctcctaaataaatataatccctattggattgcttttggtacgcaaacaaaatttcgttaggcgggaaaccatccgaactgttccaaagaataaatctattctctttaatgatataagaatataaatgattttgggcacaaatccataaacgtccttttccgtcagcaataaggtaagaaataccattgaaaagtctggtacggatacggtgatacttttgactttccagatcaaaaaatccaagtcctttgttagtgctggtccatatcatacgattgttatcgtaagacatggaagtaataagttcatctttctccaactcaaacaacagccggatactatcacttttctgatcgacccaaaaggcctgatgagcacactttaacagagaaaacctatcattggagtatgacaggcaaagtgcatcattggaaaaatcataatcacggtcagtttgcatcctcgaaaatgtatggtcatgcgtgtggtatacataagtgccgcaactgattatgtatatcttaccgtccgccacctgattagccagaggaagataaccgtaaaaacattctttcttattagtttcttcgtcaacgatagtaaaaggacggtatttatgtgttttcttattgaacaggaaaattcctttggtatataaagacaccattaactcagtctcagacacttcggcaatagaaacaactttatcaccataagtagaggggaaatggataaacttgtcagtagacggatcatacagattaattcctccgccatccgttccaatccatactttgccgtccttttcttcataaaggctaatcacagattgctcgctaaggccgttggtattgttcaagatagcttctttataagtctttatatacgtttctttaatactgaatatccctccacgcacacttccagcccataaattatctttcatgtccttgtacaacaaggttatggaattgaccggtaaggaagaatagtcccccactatgtgttgtaattgcgaaaactgaaaggttcggggagtaaataaattgattccgctcccgtctgttgccagccatatattaccattatattccgccatatccaacacataattgtttttcaacccggaattttcttttgtgtaatgcttcagcatttttcctgtccggtcataacagtaaaatccatctccataaaaagcggtataaatgtgatggtctgctgttacgtataacgatgtcaacagattctgactgcttggaatcaaaagggtgaattgccggatgcgacagtcatataaatagattcctttcttccgggtacctatcagaatcttgccatcttccaaataaagcattttctgaatcctataatccaccggattaatacctttgccttcttctttttcgatatgaatcgtttttagttctttgcttttgtaatcataacaatgaatggcattctcgctaccaaaccacataccaccttcaacccccacagatgaataaataatggagaaattaacagtgttaaactggtcttgttcatcatcatacagagctagtccctttgaagtcgctatccagaaattccctaaagaatcctctgtcaaatgattaatatagttactcggaagagaatgaggatctcccgagtgatgaaggtaagtctttatcccttcctgagtatagctattcaatccgcttttggtacctatccataaagtacctttatggtccaataagatagattgggcagtggattgagaaagtccttgctctatggagagttgggtgaatgagtaattaacgcagtgttcagaagaaagcagttttacccctgccagcagaaataatattatgattaaggtacggtacattataaattcattttctgcaaaaatacatttttttctcatcactaaaaatctgcacctcattttttcagcaactatccattaaaaaagagaggccttttctaaaaaaaatcatcaaaagcatcctatttagacaagatttgactcgaattatacgattcctgagtcatttataaaagaaatagaatacgtttgcaatgttaatttttaaagtaaattctatgaaccaaaatttaagcgtatgaaaaaggttatacttttattgttatcagcatgtagcatatttgcttgcactcatactcccaaatgggaattggtgtgggaagacaactttgacggtgcagagcccgacactagtgtatggagccgcatacctcgcggcaaacctgattggcaaaacacccagtcttttgacgaccgttgttatgaaatgcgtaacggccttttaatcttgaaaggaatcgtcaatgacaatacagaggcagacgcagcccaatacctgaccggaggattatggaccaaagacaaacgtgctttccacggaggacgtatcgaagtacgtgccagactacacggagcaaagggagcatggcctgctatatggacattgccttatgaaacagacaaatactcatggcctatgggaggagaagtggacattatggaacgtctgaaccatgactctattgtctaccaaaccgtacactcgcactatacctatacactaggaatagaaaacaacccgaaacacggaaacactattcccattaatcccgaagacttcaatgtatatggagtggatttttggccggacagtcttgtattccatgtcaacggaaaacgaaactttgtttatcctcgaattgaaaccgaacaagaaggacagtttccttttaatatcccgcaatatttgctaatcgatatgcagttaggaggaagttgggtcggtacggtagatccggccgacttacccgtagagatggaagtagactgggtacgccattaccaatggaaataaaacgataaaagtattcttagttacaagaaaatagataataaagaacttattaacttgcttaaactttaaatttatgaacggacaaaaacaaaactttttccgcattttcttagcgggcgttcttatactgctctctttcgcagtatatgcacaggaaaacacagtgacaggtaaagtgtacgatgtatcaggcgaacctattatcggagccagtgtagtgattcaaggtacgacacaaggaactatcaccgacatggacggtgcttttcagttgaaggcacaaccttcacagacgttggtcgttagcttcttaggatataaggatgtcatcctcccaataggaaacaaaaataattttaaggttactttggaagaagactccaagaaactcgacgaagtggtcgtggtgggatatgccacccaaaagaaagtgaatctaacaggttccgtggcttctgtgtcatccaaggatatccaggacatcccggtagccaatacagctactttgttgcaaggtcgtcttccgggtctggtactgactcaaaacggtgcacaggccggtaatgacaatccggaaataagaatccgtggtatcggtacttttggtaacaacaacccgatggtattgattgacggcgtggaaggcagtctttcacaaatttccgaaatcccctctgcggatatcgacaatatctctgtattgaaagacgcagcatctgcagctatctatggtgtacgtgccgccaatggcgttatcttaattactaccaaacgaggacaggcctcaagtagagtgaaagtatcctactcgggaagctatacattacagactccgggtatcgttcccgactatgtagacagttataactgggctcttatgagaaacgaagtgaaccctgacactttctcaccggaagctctacaaaaactgaaagatggttcggatcccgatcattatgcaaacaccaattggttggacgccgtattgcgcaatgccagtatgcaccagcatcatttgtccgtatcaggtggtagcgaaaatacgcacttcatggcctcggtagcttattcaaaccaagatggtatcatggtaaaaacaggtgtagagcgtttctcttttcgttcaaaccttgacacccgctacaaacgtttcacattcgggctgaacttgtccggtaacaaaaacaacgtgacggctcccgctgttgctccttcgggcgaaggcggtatcatgcgtttcgtatcttggttcactcgccccaccgtaccggtgatgtactccaacggacattatggctatgtagacggttcgtcaatgagcgccgaaatggtgaaaaaccctgtagagttgatgtccttaggacatcgcagcaacgaatattggcgtttcaacggtaaggcgtttgccggtattgaactatgggaaggattgaagttccaaacaagtcttgcttatgctttcgacctgaatgcgactaagtcttacactcccaaatctcctgcccgctatgatgcagacggaaacattgtaaaggcagcaggagagactaataaggaagaggattattggtaccgcaacgcaacatggacaaatgaaaacttgctgacttataacaagcaattcgacaaacacaatatcaatgtactgttggggcattcggtcatcggttcacgtttctacaaaacaacagcatccatacagggtttcccaaccgagaatatttatgagctcaaaggaggtacaatcaatccgggagcaacgggggaatcagaagaatataagctccaatcattcttcggccgtgtaaactacagttatgatgaccggtatttattcgaattcaatattcgtcatgacgggtcctcacgtatgcccaaagccaatcgttatgccacattcccttcattgtctgcaggatgggtattctcgaacgaagggtttatgaaagactacagaaacttctctctcggaaagttacgtctgtcatgggggaaattaggtaatcaggaaattggtaactacgcttatgcagctactttgggtgcaagcggaaattacttcttcgaccaaggtgcagacaagcaggcaggtatggtacagacatccgtccccaatgaaaacattaaatgggaaacaacccgctctgtaaacatagctctcgaccttggattcttcaacaacagaatacaaaccacctttgaatggttcgacaagaaaacttccgatatcttgatgcaactggctatgcccggcattttcctgggttctctctccgctccttatcagaatgtgggtgcagtccgtaaccgcggttgggaatggactgtaaattactccgacagtagaggtgactgggcttggaacgccggtttcaacctgtcacgtgtaaagaatgaaatccttgaaatgggtgaattggaggaaaaaattgacggcaatataatcaaccgtatcggcaaccctattggcgcttatttcggatataaagcaataggcatctatcgtacggaagccgacttgcaacgtaccaactcgaagggtgaagttatcaaacaaaacggtgtggctcccaaattgggcgatatcatgtacgccgaccttgatgacaacggtaatattactcctgaagatcgcgatattataggtaatccattcccgaaatactcttatagtttcaacctgggcgcatcttggaaaaacttcgatttgtctactttctggcaaggggtgggaggtatctatcgttacagttgggagacttctaccgacattcgaggcaacctcacgagccgttgggtgaaccgttattcggctgacaacataaatgctcccatgcctgcactaggtaacaccatgaacgattcttattcttcattctggcttgaaaaatcagattacctacgtctgaagaatctggaattcggctatactttccgccaggccgaacttgccaaagttggtatttccagcatccgtgtttactttgccggaagtaatctattgacgttcacaccgttgaagaactgggatccggaaaagtcatcgggtgatacaagaaatgacgtacatcccaatatgcgtacttattcatttggattaaacattcaattctaattacaaggaggacaaatattatgattaagaatacaaaaaatatatgcagagttttactattatccggaatgttattatctgccagcgcatgttcggacagttttctacagacagattctccgaaccagccttcccaaacgacctattggcaaaccgaatcggatgcattgatggcactgaccgcttgctacgacgccatgcaaagccaaaacttatatgacgacaacattgacggctggaaattcggatttctgggacgcgaaaccagcacagacaatggtgaccacacatggggtaactggatgctaggtagttccatttcacaatgtacctcggctaccaccgatgaatgtttttcaatgtactggaacgccaattatgaagttatcaagcgatgcaatatgttagtggaaaacgtagaacgcataccaatggaacaagaaaaaatagaagcatacaaagctgaagcaatagcattgcgcgccctgatgtattgcaatctgacttctgttttccgcgatgtaccctatctgacaaaacctctcactctgtcagaagcccaagcacccaaaacggagcgcagccagattatctcttctttgttggaagatctgaaaatatggatccctaagatccccgtgataggaaaagcacagacaggacgtctgactcaagaagcagcctacgctattatgggacggatagcccttttcaaccagcattgggacgaggctataaatgcctacaaaaacgttgttggtaaaatacaacttttcaaatcgggagacggcagcgacccggcagctaactttgcagacttattcaaggaagccaatgaaacagctggtgaagtattactgagtgttcactacaaaggcccgggactgggtgaaggtaattgctttggagtttgctggtctgctccgatgaatgccatcgaaggatcaatgaatttatgcgatgatttttattgcacggatggattacctattgacaagtctcctttatttaagggtagccttgacaaaggagctcatacaaaagagaatccggatatgggacgttatgagaaccgcgaccctcgtatgaaggcaacattgatgcttccgggaatggaatggaacggaaagttgtacactaacaacttacctgccagctccacatgctgtatccgtaaatggtttactcccgaaaatacggcaaacgaatatgacggtagcttagatttctatgtcatccgctatgcagaggtactattgtcactctctgaagctatgattgaaaaaggcggttactcccaagcggaaattaccaagtatatcaatgaagtccgcgaccgcgtaggtatgcctgctgtagaagaggtagaaggaactaatctggaacaagatgaactacgcgccattgtacgccatgagcgccgtgtggaactggccttcgaagatttacgctttgccgacctttatcgctggaaagattttgagaatgctcagaaacgtatgcaggaagacaagtcattctatggcttcggagcagtcgaacgcaataatctacgtggagcacaagatttagtatggcctatcccgcaaagtgagattgatacaaacccgatgttggaacagcacagcgaatggaaatagtactacctgattgcagtatataagtaaagagtgagcacgaagccggaataaattatggtttcgtgcttattctttttttaatgcagccatttacttgtttcaaaaatttctttctgtcacatacataaaaacggtaccccgattcacatcgcagcaccgtcacaacacaaacacaaaataaaacacgacaaaactactatgcaatctacctgttatgccggggaggcatattcaccgactcatatatactcgcatacctacaagtagtcatcaggcgatttgcatatataaaacattcctatttcggttttgttcacgaaaaagatgttttatatttattttttctctttataatctttcagaaagccctccattagccattttgccaatgcttgacgattggaatttatcaccagacggcgctggtcaaaagaattttggatattgcccagctccacgaaaacagaagcgggagtagtatgcgaaagcacatacaaattgcgtccgctcactgttccggagaatccccggttcggctggtgctttccgtactttgattcgaatgtgtctttcatattattcgccaagcgcttgctaaccgcttttttgtttgaatgatagaaaaaaacatcagtctgctttcccttgctacggctgtctacatggatgaagattgcccggcagtaggaataattcttacggtctttctggtaaagggcatttatcttgttacaacgttgctgaagacgttgtacctgattcaacgggatcacatcgcccatgcaagtctcccgtttgctgttcgacaggtacgaatcgtctcgaataccgtctttggcatcttgaatgatgatatgaacttccgccccttcctgcatcaggttacgtgccaggcgaagagcgatgtcgtaagcatattcgtcttcgtgaagttcgtgcttccctacccgtccgatagctccgggatcgggtccgccatgtccgctgacgacataaaagcaagcacctgcaaggcggttggaagtgactttgacatttgccagttcctttccgaacaaaggttctttgatagtggttcctattttagtcgttttagctttggaagatctctgctgggttcctgtacctttagctgttgtatttttagcctctgtattcccggcagaagttcccgatgatttctttaccggcggaatgacataagtcacgcccactttcagcacattattctttcccagtttcttcttgttcagttcgataaagtcatcgtagtacttcttcggagaacggttgtgcctcaacagaaaagacgagatgccttctcccgacttcggagtagccctctgctgcgcccaaagtgccgtacccgagaaaagaaaaattaagaataaaagaatatagagtttatttttcatatctacacaattatctccttcacgtgagtatcatttcactcataaacagggcaaaaatacaattattttccctacttttgcgccattaaaacattttttgaaataaatcattaaaacccgataacattatggcaaaacaattcaagcccgaaaccctgtgcgtacaggcagggtggacgcctaaaaagggcgaaccacgcgtattgcccatctatcaaagtacaactttcaaatacgataccagcgagcaaatggcacgtcttttcgatttggaagacagcggttatttctatacccgcctgcagaacccgacgaatgacgctgtggccgctaagattgccgccctcgaaggtggtgtggccgccatgctgacttccagcggtcaggctgccaacttctacgctatcttcaatatttgccaggcaggtgaccatttcgtttgttcttccgctatctatggtggtactttcaacctgttcggagtgacaatgaaaaaactcggtattgaggttactttcgtcaatccggatgccggcgaagaagaaatttccgcagctttccgtccgaatacgaaagcattgttcggtgaaacaatttccaatccttccctcgaagtgctggatattgagaagtttgcccgtatcgcgcacagccacggtgtccctttgattgttgacaatactttcccgactccgattaactgccgcccgttcgaatggggagcagatatcgttgttcactccactaccaaatatatggacggacacgctaccagcgtaggcggttgtatcgtagatagcggtaacttcgactgggatgctcatgccgataaattccccggactttgcacgccggacgaatcttatcacggactgacttacacaaaagctttcggcaaaggtgcttatatcactaaagccactgcacagttaatgcgtgacctcggcagcatccaaagcccgcaaaacgcattcttactgaacctgggacttgaaacgcttcacttacgcatgcctcaacattgcggcaacgcacagaaagtcgccgaatatctgtccaagaacgagaaagtagcttgggtaaactactgcggactgccggataataaatattacactttagcacagaaatatatgccgaacggttcttgcggagttatctccttcggtctgaaaggcggacgtgacgtatctatcaagtttatggattcactggaattcatagctatcgtcactcacgtagcagatgcacgtagctgtgtgcttcacccggcaagccatactcaccgccagttgtcggacgaacagcttatggaagcaggggtacgcccggacttgattcgtctgtcggtaggtatcgaaaatgcggatgatattatcgcagatatcgaacaggcgctgaatgcataaaaactgattattacagtattacatcataaagaagagactggctcaattccgttttgagttcagtctctttttattatccttacaataaattgcaataaaatatgccgttccagtatgctctgacaaggaagtattctcacccttatgagaaaaaatacttattactatgagaaaaagttctcactatgatgagaattttttctcatcatagtgagaatactttgagaaaaaccttatctcctgtttcgaatctgaatctcggtgaagcagtttgccacttgtttatgataagtgttaccgttatttcgacaagcaggaaataagtactgctccgatctaccgaaatgatgatacagggaatatattccacctgtatctcttagatcttttatccgtgtctcctacatgaatctccgaacagaaatcgttaaaaaacattatatttccgtatatacaaggtcacaacttacctgtttttttccataattttgcaaaccgaattagaaaagcaggtatcaagatgaaactaaagtattatcaaatttccattcgctacgagaacaaaatgcatgacttccacggttggggtgtagcagtgcagatttgattatttctataagaactactcgccacgatgcgaaatgctggcttcccttctttggaggcggcatgatataggaacatatatttatcattatcaactaaatttcttttttattttatgagcaaaaaaagatggctcatagtaccgctatgcgtagtactatgtagtcagggttcatttgcccaaacacttaccaggaaagttttgggcattaacgagatgttccgtctggcagacgagaacagtcagagtattcaaacgtataaaaccgagaaggaagttaccgatgaggctttgaaagctgccaagtcacaacgtttgccggacatcagcgcatcgctctctttcagttatttgggtgacgggtatctgtgggaccgtgacttcaagaacgggcagaacattccaatgccgcattttggtaataactttgcgctggaagcacaacaggtcatttatgcaggcggtgctatcagcagcagtattactttagcagaactcagtcagcaaatggctgcgctggactggcagaagaaccggcaggagatacgttttcttctgaccggctactacctggatttatataagttgaataaccaagtacaagtgttgcagaagaacctcgatttgacagaacaggtgattcgcaatatggaagcccgacgcacacaaggaacagctctgaaaaatgacatcacccgttatgagttacaaaaagagacattgaaactgcaattagccaaagtaaaggatgcatgcaaaataatgaatcaccaactggtgactacgctgcatcttcctgccggaacggaaatcatccccgactccaccctactggacgaagaagtgaagactctggcggaaaacgactggcaactactggcttcgcagagcaatgtcggtttgcagcaagcacaactggcaatgaagatgagcaaacagaaagtcaaactggaacgctcggaacttcttccgaaaatagctctcgtagccggtgagcatctggacgggcctatcactattgaaatccccgtgctggataataacttcaattattggtatgtgggggtaggaatcaaatacaatctttcatcactgttcaagaacaacaagaaagtacgccaggcaaaactgaatatgcgtaaggcacaggaagaatattcactagcgcaggaacagatagagaacggcgtccaagccaattatgtcaatttcctgacctcatttaccgaccttcgcacacaagagaaaagcgtggagcttgccaatcagaattacgacgtaaccagtaatcgctataagaatgaccttgcattacttaccgacatgctcgatgccagcaacatgaaattaagcgcagacctcggtctggtcaacgcacgtatcaacgtggtttacagtttctataaaatgaaatatatcacacataccctttaattgaaaatcaattattcatacccttttaaatagaacagattatgatagctagaaagactcaaaagattatatacaacattctgattctttgttttctcattggtggtgccacttatgtttgttcccggttcattcatttgggaaacatcgaatataccgacaatgcacaggtgaaacaacatatcacacctattaatacccgtgtaccgggatttatcaagaagatatgctttgaagaatatcagcaggtacgaaaaggtgatacgctcgttattattgaagatgcggaattccgtcttcgtgtagcacaggcggaagcggatttggccaatgccactgcgggacggcaggcaacgaccataggcattgccactacccaaaacaacctgagcgtaagtgacgcaagtattgaagaagtacgtgtacaaatggaaaatgcccaacgtgaactgaaccgttttgaaaagttattgcaggaagatgctgtgacgaagcaacaatatgataatgtgcacacagcttatgaaacagccaaagcccgttacgaacaggtatcgcgtgccaaacaatctacgtctttagtgaaaagcgaacagacacatcgcctaggacagaacgaagcaggtgtccgcctggcagaagctgctttagagcttgcccgtctgaatctttcctatacggttatcatcgccccgtgtgacggtaccacaggaaagaaagagattctagagggtcagttggttcaaccgggacagaccatggtggatattgtagacagcagcgatttgtgggtaatcgccaattatcgtgaaacccagctttccaatatcagagaaggcgcagatgtggaaatgacagcagatgcagtgccgggcgtcactttcaaaggtatcgtcgaatccatttccgatgctacgggagcggctttctcaatgattccgcaggacaatgcaaccgggaactttgtaaaggtagaacagcgaatccccgtccgcatcagcctgaaaggaaacaagccggaagatttaaaacgcttgcgtgccggtttcaatgtagaatgtgaggtgaaatattaacgtatggaaacacctgttttaaatggccctttcgtgatgcccatgttccgtagcttcgtaccgcggaagatacaaccgtggatttatctgttcattgccgttactttccaactttcgggcggggtgtatttgggagcattgaaccagatgatcgggggaatggcgttgatgcgtgaggatatattgatgtgtatgtacgccaatctcgcaggtatggctatctacttccccttgctgttccgcatgaagttccgttttacaaataagacgttgctcacatcggctgcattgggggtattggtctgtaacctgattgctccgcatattactttccttccgctattgtggttgatatgtttcatcgaaggcatgtgcaaaatccagggaacctttgaatgtatgtccaacattcagttgtggatgacgcccaaacgggattttaccgttttctttccctggcttcacatcgtcgtcttgggaagcatccagttgtccgacctgataacgacttatctgatgtatcattatcactggacatatatgaatcttttcattgcaggattgatgataatagtcctgttgatacagaccatttgcgtaaagcatttccggtttatgcgcaagtttccgttgttcggcattgactggctgggggcagcgttatgggcggcattgctggccgagatagctttcctcttcaactacggtgactggtatgactggtggaacagtccggttatccgtcagttgtcggtagctatcctgataaccctgtttttttgcatctggcgcatgctgactatccgtcacccgttcttagagcctaaaatgtggagttaccgctacctcttacctttattgggactaatcacactagtggaagcatttctggcaaccgagcatgtattggaagaagttttttatgaggaagtgatgaagtatgaggagctggtaagcgtgcaattggcgtggtttgctattatcggtatagtaatcggctgcgtattctcttattggtggatgcatatcaaacactataattatgtacgtcttatcattgtcggtttcttagggcttatcggctatctgatagggttctatctgacaatctctactgatattcacatctcacagctttatcttccgacaatatgccggggattcgcctatgcggtattaagcgccacctttatggtctgcctggaagaaatcatgactttccaacattttttccaatcgttaagtgtattcaatatgcttcacatggtagtcggcggtgtattgggttgcgcgatctatgcacaaggactggcttattacgttcctgataacctggcacgctacggggcggcaatcgaccatgtatcattcagcagcagtccgttcaatctcggtcattacatggaagagtttatcagtcagatgatggaagtgagcatcaagcagatttatggctgggtggcttatgcctgtatcttcctattcctgctgttgctgctttatgatttcccggtgcgccgttcgttgaaaagcatgccaagctggaaagaagtggcacgtgatgtaaaaaactctttttggcgtacagcacaagggacatcaaaaaagataaataactaactatacgaatgacatcaaaatagtttcttaaaagaaagcgactgtcacccaaatacaggagcagccgcttttcttgacaataatcagtacaagcgatatctatacatttataaaatcaagttagtgttcacgatctataaatgtacactctttacccaacatagcctcaccatatttctttggaaacatattaggtacagcatgatatgtttttgatacatgattcacatcgatacctttctttcttactatataagactccccaattgtagttttaaaagaaatcacgttatctttattgacttcaatatttacatttcgattattctgcgtgacaacttgaactaaatcatcatcccaaggattctgtatacgacattcttttcctgctaaactttttatctcaacaaatggaatattccctaaactatctataaccgaggaaacaataaaagctccttcagcgcgtagagtaaaagcagatgcgaatttcgaaggtatcgccggaaatacccttatctttccttcgtgactttgaagtaacatctcattgatagcagtacctaaaagacccattgtttccataccacattgaacgaaaggctttgtccgaaagcccgattttccggcttcaggacgattgtaagtcaatcttgagtcatacatatagtcacgctgagcatataattcggcattaggaatctgatcaacataacgagaaaaataatgccaatggtctaaattgtaaaatagcccttgattaaaatgctgcaaataattaacgctacattgcaaacgctccaacactttatctcccagccccaatcgtgcggaaacaatcgctccgggagtaatagcattccggtttttcggatgatgcaaagcaatgtttcgggctatttcaaaataatcggtccctttatgatccaatccaagcacacctgccggaaaaacagctgtagtatgtgcgtcaaaatgatagccttgtatatttgttttcgcatccggatacacttcattattttctgtaaacgccaatccaaatacctttcctttttcgggtacatccaaaatcggaggagcccataaatgtgatataacatgtttccattgttttatctttgacttatccatatttaggtcctgagcagctttaatacaatttttaaataatgactcaatcatgtatctatctgttattgtattctttaatttactactccattcatgttcgtaaggttgtgcaggataaatataaaattcttttcggacatcatcccactgaagaaagttcaagtagaattctgcagcctctttcataaacggataaattgtattcctaagatagtcacggtcttgggtataagcataatactcccacattattttacttatctgactggccggagtataattcgttgtcatatttccccaattagcactaaccatgttaccggaaaaatcatgcgcctcagttattaacaatccgtcttttgtccctttctttctggctaatgcttttccttgaggaatcatattgacataagtttcaatataaggtcgtaataaatcacaatcattctgaacagcaagcccccaataagattcttgggtattccagtgatggggtgtagcccactgacgatgatcataattagtagtccataacccgccattaaatggtaccggatattttccccgtgaagaacttcccataagataacgacgaatataataaatattctccagataattgtctgccagatgaacgaatgacttcgaccaaaagtgagtccaccaactgagatgttctttccgaagcgctgtaagcgtttttacttccgctttatccagtaatgaaattgcctcttgagtcggattgtccgaatcattagaactgacaactgatattaaaatcttatatttctgtttagaagacaaaggtgtaatcattgagctttcccgatcactgacacgcagaatctctgtcggggtctcaagtacccgacacgcaatagtaaaatgaagaccaccttcaaacttttcttccaaaatgatgtcattttcctgtctattcacctttgcagtacctaatccattggccacatcccggtcacgtgaaccataccatcctccaaagttacaactgccccaacgctccaaagaaattcgatttacagctccggaaggcaatgttttcttataatcagcctgacaatctatcacccagacattagagtttgcatctacccaagatgttatctccgtatcggcaaacggtgtcgaactcttaatctttaaatctgcgttttgcagagataaacgagcttcaaaatcagccagatgcatatagctataacacggtacacctaaattaacatttaaccgtcccgccgaacgcaaagtcatcctcccattagctggtttatcatataaatctattttgttaatttgtaaagtaatgccctcgttggtaaaccataacatacctccgagatctccattaccaagaggaaaaccattgaaactgtcaaactccggttccagatagacaatatcatgctgactcagatagttatcgtcaattttaaaaagggaagaagcttgtataacacatacattacaaaacaaaacaattaaagcagaaactatatttttcattttacatttactctttgatagtgattgattttttacttctgtacacaagtcacattttgtatctttcctttaaacccattcaacggattgccaatccagcgtaaggggaagattaacgtctcctgataaggcatataatccatacgcttgttttttttgcaataaactttcattttacgtccttctaaacgttcttgcaatttgccattaacatatagtgatgtgcctttataatcccctgaaatacaaatatctgtccattttcctttcggaaggcaataagaaccgaaaacgaaagtatacccatcacgactgaaagcaatccgtccggtattttcccagttggtatatactttggaatgtggtccttcaaatagaattccgttgatattggtatccttgtccggataaattttaaatgatactacgtaagggtaacccacttcctgcaaagcagtacgaatagtatctgtcccactcaataaacacacctttcctaaaggagtcagacacatttctttaggaatccgtgccaataaattcactcccggagcttccggcattatgcggcataaggcttcaaaactttcgtaagaaacaatcttgttatctcctttccaaagtttttcagccaacacttgaatagcaggaaaagaacgtaaatgtacatcctgttcagaaataccattgccacacatgtcattccatacagcaaacattccacctaacactcccggagttccttcaggaagcgtctgcttactattcatcaaccatggactccatgattcatagatccatttatgatctaaaaattcacgatagtaaccagctccgggcacaatatatagataagtatcgcatgtgtttattagttgatatccctcccttaaagaggcttcgggatctatccagtcatacgaccatgcattaactgtcactcctcctgcctttacgggagttttaccgggtagccatttcaagccaccccacatacgagggttcttaccatatttttcgatatacttcagataacgatcagtaaaataacgatattgctccgcttccttcttgttatattcatccgtaccgatatgtacgtcaggaccaatgaatataggatgctcaccagaaagatactcatcaaacagcgtatcaagaaaatgataagtctcatccttataaagatccaaatgatccattccgtattccttactgccgatctccggtttgtaatgcgtaaaagcaagagagtgtgcaggaatatctatttcaggaataacgtttactccatagctcattcccatacgttgtaaattagaaaattcctgtttagtatacgaaccatccttagccgtcaatccaggaaaacgttcactttccaggcggaaagcagcgtaggtcatcttccaatcattgttaaagaattgtggaaaaccattatcattcaaatggatctggaactcattcattttatagaatgaaagtattttgacatattgtttcaaataatccaacgtgaaaaatttacgagctacatccaacataaacccacgactcgaaaatttcggaaagtcacgtgctgttcctttcggcaatttaccttgctgattatacaagatttgcaaaaggctgcgtgtcccccaaaagagtcccttcacagtaggtgcctcaatactgacataatgggttgtagccaacacatacccctcgtcacctaactgtttgtctggttttatcaacgatagataaatatcattcctttgtggttttcctgtttttatgatgtaatgccaattcattaaatctctcaagtcatcgaccaatatacgagcagtggataaaagttctgcttcatgggctggatttacaacgatacttccttcagcaggcaggagcaattttccatttcctcccttccattgttgcaaagcaggaataacacaaggacacggttcttgcgcaaaagtacccaagcataccacaaacagataatataatgtaagtaacagttttctcataatttcaaatttatctatacttttgatagaacatctctctatttccactctgatcattacgattatctacctcactgaacatccagatatcattttcttcagccagttgaattaattgagtaagcagttgtttgcgttcttctctcgtgccatattccaaacgaatttgagcatacattatagccattcgctctttccgaacccgtttcaatacatccggttggtttattacagctttttcagctaaatcaaaccaatgtttgtaacgctctatacattcttttgacagataaccttcacgatgagcttcaagatcaccatccatagaaagtatggcttttgatttttttaatgcttgttccatgtcagcgatatatcgcttgatataaactcctgccttaccataataccctgctaaaaaatcatccatctcctgtttcatatcacattgtggattccataataatttagctagcaaataaccacgtagctcggcaaactcaccccctttttccctatttccttgacaaaaaacagctgaaacattattagctatatagaaattaatattgtcctgcatagtactgaaattgggaaatggtgaaactaagttttgaaattggataacatagtcccaaaccaatatttcattacaaatctttccccagtctaccaaatcctttctaaatgtagcatgaatatttgaagtagcgataggaaaattaataccttgccgggctgtttctatagcacacatttgaattacaacattagatgccggtttagtatatagcggagcctttctagtgtaagtataagctaaagtcgctatttttttgtgcggaaagtgctcagctatttgattaacgaatttcaacatcgttccactggggcttccatcatacaaatctgatgtttgacattgctgacaagtacagttccctcttccgtccatttgactcacactccaataatgtgctaatgaatcagcccatacaggaacttctgcctgtgttttttgaatcagtcgatttaaagaattgatagcatgataaggaagttctggattagtcaaacataattgtgttccttccgaacgtggttgaattctttttccctcaatttcagaaaaatattcaggatgagtatcataaagactgggagaaaccacatcatagagtgaatgacaccacagcccccaatcagcatgacgaccaccttttatagcccacctattaggagctgtcagtccttttcgaagcatattcccattcagtttcagttgtgcagcaataacaggatcacacaaatcataataataaacttcccgccatttcacaacaggtgtatagctttcttctataaaaggtaattgctttttatttaataagggaataaaagaaacttcagagctataccagcgacatcctatatatttttctaaaaaagaatatactccatatagaacacctctaccattttgtccactgatgacaactgcatttttttgtatgtttaagtaataaccatcttcaccaagtgcaatattcgccgggagtacgtatcctgtactatctttctctttagtaaatactaacatttcaggtcgatccaatgaagcagaatgtcgaacacatgaaactttaaatacttgagtgatgtatttgcttaattcatcggctgcatgagttacgactttgggggcgtcagggcaagtataaacataataggttctaccactttctaaaaccatttttttgttttgggcctgcaaagatactgctaccaatagaatatacgtaacaaatatatatttcatggaaactttatcatttataaaatttagaataaaaaagaggggacaggacattcagaataatgcttatcccctctgttaattatatatactgattatctattggagctattttatcaacgtacattgtataatccattctttggttgttttaccatcggctgcaacaaccttgtatttggaaactttggaaaaatcgccccatttgcctaaggcaggtgcaccttctagcggataaatagtagatgcggtagaaattgtagcaatacctacaatcttttccaactttacattattgcgtacctcctcagtgaaaaaactgggatttccagcttcaggaacagtgattgtgcaataaacagtatttccttctatttttacattagtaggtagtgaaaccacacccaattgagtgttatttcccccatttatagtttgttcccaacgatgttcaaacttaaatcctctgatctctgcgtcattataagattccagttcatccagccctgcttccaaacaagaagataaagtcaataacatgaagaacgtaaaggcacttagccaagagatatctataacttttttcatattcattaccaatgattattttgttgtaaattaggattagacatgagttctgattcaggcaacgggaaatacatgcgtctaggccaagagaacactcggtcgcttcctgtcgaacttccatgactggtatcaattaaagtaaatgtatcatcgtccccatcaataataatacagtgggtacgtttgttaaactcagatacggaggttgcattttccacttttgcccaacgaatgacagaaaaatagcggtcaccctccaaagctaattcaacccgacgttctatcttataatatttccagaaatctgcttctgaagaactttccggcaaagcgggtaatccaccatgttgagtacgagtcatgttcatcattctaatagccttgtctatttctcccttgcggccaagcgcctcagcatagttaagacaagcttcccccaatctaaataggatataacgaaaatcataaaggatctggtatcccggaagtgcatctgtaccgtccaattcataaatgtatttacgccacatatatccactttgagtcataaaaccatgattctgtgtattttcccagtagcaattacctttagtatccatctcaataggagaagtgaaataagtagtaccatcataacaaatagtagcatccaaacgtttatctctgttactatacataatggaagcagtctttaccggagcatttttccattttgctgtctctgtataatgttttgcagtttggtctccctctacatcaattgccaaataggcttctgtcagttcatgggagggccagttagcacaccatgcatccactttatcattaaaagccggccccataatatttcgtccgggtgctaatgtaccggcaacatacataggaagtaaattctcacaatactgttttttatcaccttgtgtaaaatagaactgaatttccggactcgtttccggataagaaaaactaccgaacattttacgatattcagggtctatactccagttagcagcttcctctccttcaaacagttgttttccagcagcaatagtttcatcatagagaccgccttccaatgatacacgcgttagtaacgtgagtgctgctccttttgtaaaacgctctttattggcagttgagggtagatcgggaatcgcaagtttcaactcattgaccataaatctatacatttcttcttctgtactacgagacattaacatttcatcactaggagtcatcagtttatcaacaagcattactcctccccagcgacgtaccatccaactatacaccattacgcgcagacaacgagcttcggcaataaactgtttacaactttgtccgtcaatatcaggattgttagtcaattcttctatgataagactcgttctacggatataagagtatttattaaaacctcctatattattttcaatatttgtaggagaaatagcttccgctgctacagagttgttatccttattccaaacattatctgtccacgaatctgtacgcaaacattctgtattattatctcccgaacaatacaaatccttaagaattgtccaataagcttctctcagcacattttcggccaaatctttattacgccatattaaaagttcgttgtacgagtccattggttctgtatcaagcacatcacaagatgccagtccacacaccattatcaatgctatatataaatattttttcatatattttcccttttatttaaaatgttaggttaactccaaactgaataatcttctgcaccggataacctacttgtcccatagactcatcatctctaccgtcttccgggtcaatgtgatactttttaaccggagagaaagtcaacaagttgttaccacttacataaagctcaaattgagaaataaagctcaaatttttcaacaagctgtatttcaggtcatagctaaatttgacattctttagtctaagataagaagcatccagcaaccaataagttgaagccatatcattgttccccccgttttcttgtgcattattagttaagcgagggtagagtatttctccggtattacccggataatagaatttttcactacctgccaaaccaatctgatttgtattaaacttccggttgaatgattccaacaacatatttcgggcacctgtaccttgtaacaatacgtcaagtgtaaatcctttataagatgctcccaaagtgatgccataagtcaaatgcgggaatcgtggagcaccttgacgtatccggtcattagtatctatcacaccatcaccgttgatatcctgataagcgatatcacctggtcgtaacaaggtagaggcctgaggacggggactatccaatatttgttccatattttgataaagtccgtttgagacatacaataagtcaaaatatgatttttggtgtgtgagacgacgtaatggattcttcaaatcggattcttgttcatcatatttcctttcccagagttcattataatatgacaaattaagtcccacattatacttgaagtcacgtgctatcttatctctccatgccaaatttagttcataccccgctctacgatgagccgaatttgtcttaaccataggcatagcagtccccaacggtgtggtataagcatctttaggattagctaaataattggtcgtacgataatagaaatactcaaagttagcagataaacgttgttggaaaaactctgcatcaacagcaaggttgatagtatttctgctataccatgtcaaatcctgactaactaaatcaccttcacgcaaggtagaattccattttcctccttcgtagaaatcatttcccttattatacaccgacaaatatttaaaattacctacgtcatccaagcctattttgccccatgagaaacgaaatttcaaggcgctaaaccaattgttattcaataaaggttgcatgaaaggctctttatctacattccaccccacagaaactgatgggaagaatccccaacgctggcctttaggaaacttgtccgagccgtcataacggaagttagcttctacaatataacgcatcttataatcgtattttaaacgacctaccaatcccatacgtccattttcccttgcagtaccgttgttttccgctgtagaacttggtcctccgtttatctgttcaataacgctagtctcatattgtcttctcaatgctcccaattcgttataattgtacttccaagagttgaaaacagcagtcgccccaattgtatgagcttctttgaatgttctattataatctgcccgtgcttcaaaagtcacctcattggaacggtacatatcttcatccaaacgagcttttccaagattagtaggttcatcattccattcccatacaggtcctacgcctgcttcattagcacgccaatccttattaaaactatcatacagattataattcacaagtgctccaaaactcagtccggtaactttaggaacatcccattgcatcgacaaattcatattggtatagcgggtatcattttttctatatccagcagtcggatcaatttccacatatggattttcctgaccacccgtcggatgacctgcactattaaaacatctagccaaagaatttaaacgtgccacatgtgtccaaatagtatacaaaccattagggggatattgtgttttgttctgactaaaagaaacatctccatttagtctcaatcctatttgatcgaaatagtggtccacatgcattctcatatttaaacgatcatttttagaaatatctgttttataaatacctcctaaagtgtaataacgtgcagacataaaataatgagtgttcttacttcctccattcaacgaaatgttatgcgactgcataggagcaaatttgtggaataacaagctattccagtccgtgtttcctgtcacatcgttgaaagtaccatttttcacagcgtccagtacaccttccggccaatacaaattaccattcgcatccactttcataaaagtaggcattccgttattatagaccgcggccctgtctgataactctgcaaccacatagttgtcaaggaattcaataggctgtgtaggtgaacttaaagagtaagaaccattataactaattgtcattttttcgtttgtaccctttttggttgtgaccatcacaataccattaccggcccgtgcaccgtatacagccgctgcagcagcatcttttaaaatagaaaaagattcaatatcactaggtgaaagcaccgaaaactcttgttttgtactaggtataccatcaattacatacaagggttctccacctccacggatagaaatactaggtaatgcccccggctcacctcctgccgattgaataaagactccggttgctctaccttccaaagaactgataatattggtattaggcatatttaccaaatcatcgcctttaacactagatatagaactagttaatcttttcacagagctctttccataccccactacaacaacttcgtctataagtttactatcttcttgaagtttaatggttagcgaagtgcggttaccaatcttaatagtcttagtcaagtatcctacataagatacctcaatcaccggagaatcaccggacacattgacagtaaatctaccatttgcatcagagattgttgcgttcgaggtattcttttgtaaaatagtagctccaattaaaggttctccgttgtcgtctgttactacaccgctcagtttgcgactctgctgttgttccagcacattaaaattgttttcgtctatcgtcgtagtggctgatattcccaaaataggcaaggatataaatatcacaagtagccctttttttaataattgagatagacaataatggtgataataattactttgcatcattagtcttaaattttaaatcatgaatactttttatattacttgagttaaaaccgtatggcttaaggaccggatttgtttttcataggcaaatgatttttttgttaatatagctttattagaattaagttcttgggcacaaaattagttaatgtacaagttgcccaccccacgtaattttatcaatttccccccttttttctatcaataatgcctctacagctattctcatcaaaagaatatcatatttttcttcgcaatttagctactggagtataatgcgagttcgatataattcaactacactctttatttcattattaataatttcgacatcaataatgaaatcttttcaaaatataatatactgcaatgagcacattacaattctcttttcactctaccgaacacacattttcctgatacaacacaaattctttgcagaaaatatccttcatttaataaaattccgtaactttagtctcgaaaaacacagtggtaattatataaaatatcacaaaatgatactttttgttactatttttatcttttaggaaacaatcattaatttaagttgaaaatgaaagtaatgaaattatatctcttaatcattttaggattactattaggaaaattaaacagtaaagcgatatctccgttttatacaaaccatacaaattttaagcagttaaccattcaagatgggcttaaagacaacactgttttatccattcacaaagactctaaaggtataatgtggctaggaacaagcactggattaagtaaatatgacggcaatcattttactaattacacactagaccaatattttagcatgaatgtaagaaaaatagaagaggatagtcgacatatattatatttgcagaccaatgattggatcacatacatggattgtaaggatgaaaacacaggaagacttcatactcttgtaaaaaacaaagattatcaggtaacagattttcttttgctcaatgactccactctctttgcttgcgataatcagacgttaagcagcttcagaataatgctagaccaaaacggtcatcctttttcaaaattagaaaaagtttacccgtttgaaatggcaaaaggagagcgatttatgaaattctgcataaccaataaccataggaaaatctacttagtgactaacagcgcacgcgttcttttattagagatcagtacaggacgcgttttaaagcaaaaacgtttgttaaccacaaaacatgagtttggagcttcttcggttgtatgccacaatgggaaactatttatatcctcaatgttacatggcatttttattatggatacttcattggaaaacctcagtcatattgccaatcaacaaaatatatttcccactcatttgtcccataacgatgtttacaacatcattcccatttcagattcatctatccttgctacaacatggtatggatatactatgcttttggccgataataacattccaggtggatggactacagaaatacgtaccagcgaaccaacgtggcagtcattaaacttcgaagcacgcatgatatcttcttactatgatccccatggatttttatggatcggaacacacggaggaggcgtattagtttccgactggaagtggaattttatcaaacaatacaatttcaaagaagacaatgaagtagaaagcatcattattgatgatgaaaagaggatttatttgtcaacttatgaacaaggtattttttacactccaccattatatgacctaaaagatttcggtttacgtgagttatcgcaaacagatagaaaaacagtactatgcagcatgaaggataaagatgggaatatatggttcggttacaaaaatggaatgctcgttttttattctccacaaaaaaaagaagtacaaaagtataatgtaactgacacccctatcaatgtactgtttacagattccaagaaaaacttttggattggaacagaaaatggcctatttctatacgactgtgacaaaaaaaagaaaaaggaagtaaaattaaaacagactgtaaactgtgtatttgatatagctgaagacaatgaaggcaatttgtggatagctaccagtttagggctattaaaactaaattatgccaacaacaaacaacatatacaacattttccgacaaacaaacatacatatacagctcagactgtattagcagcaaaagacggaaccgtatatgtaggctatcaaaatggattagggattgtagcacacggagagacaactgtaaaacaagtgtttaccaccatggatggtttgggaagtaattggataaattgtctattggaagataaacaaggctatatatggattggaactaattcagggttcagttgctatgacaaatccataaatcagttttataattattatgcttccggaagcagccgttctgtggctctttggggagatatgctttgctggggaggtaacaagcacctacttttcttctcaccccaacaggcaataaacacttttaaagcaaatactaaaaacccaataatcattacaggtattgaggttaataacaaacctctgattccgggaaaacccgtcaatggacaaatggtattgacgaaaacagccgagtacacagattacatctctttgtcacacaaaaacagagattttgcattatcattcagcaacagtccttatcccactgcgcaaaaatacgtatacaggttgataccttatcaaaatgaatggatagaatgtaatagtaaagagaaaatttcttatgctaacctattaccgggaaactatacatttcagataaaaaaccaaaaagcagtcaaagaggaagatataacctccttaaaaatcaacatacaaccacattggacacaaacctggatgtttcggttctttgtattgttagtaatcattggaggtatttattactcaatatttacaattaaaaggaaacaccaacgtgaccaactaattgctgagttagaacatggcatcgccatctataaactacaatatcaacaagcagaccaattgtcacatgtacaagaacaagggacaaattatggtaaagacaatgaagacagtaatttaaacaatccatcagaagaaaaagactatcctctttctgattatctggaagcacccgtccctcaacaatctaacaccaacaatgaattcaaacagtctaaccaatatatcttcatgcagaaagtgatcaacgtgatagaagataacatagcaaatgagaacttcaatgtaaaaatattggccgatacactttgtatgagtcaacctacattatatagaaaggtaaaagaacattttcacctaactgttacagaattaatacgaaaaatgcgcatgaacaaagcagcttccttattggcaatgcgcaaatattcaatcttagagattaccgaaatggtaggatataatgattatgaaacttttaggaaacacttcaagagtcaatttggtgtatccgcctcaaaatatgtgaattgcgaataaaataacgagcgaacagacttattgaccggaaacaggacacaattacagtcaaactacatatcgactcattattttagtcattttgctataaaattaatagaaattatctccaaaagacgacagattcaaacttttattcctacatttgcagccaaatgataacttattaataaaaatacagataccatggctaaaataaccaaagaagccgctttgctctatcactcacagggcaaacccggtaagatcgaggtagttcctaccaaaccttacagtacacaaaccgacttatcacttgcatactctcccggtgtggcagagccttgtcttgaaatagagaagaatccgcaagatgcgtataaatatacagctaaaggcaatcttgttgccgttatctccaatggtacagctgtgctcggactgggtgacataggcgcattgagcggcaaacccgtaatggaaggtaaaggactgcttttcaaaatttatgcaggtatcgacgtgttcgatattgaagtagatgagaaagatccggaaaaattcattgcagcagtgaaagctatcgctcctactttcggcggcatcaacctggaagacatcaaagctcccgaatgtttcgaaatcgaacgccgcctgaaagaagaactggacattcccgtcatgcacgacgaccagcacggaacggctatcatctccagtgccggactggtgaatgccctgcaagtggccggaaagaaaatcgaagatgtaaaaatcgtcgtgaacggtgcaggtgcctctgccgtatcttgtactaaattatatgtatcactgggcgcacgtctcgaaaacatcgtcatgctggacagtaaaggcgtaatcagcaaggcgcgtaccgatctgaatgaacagaaaagatattttgcaaccgaccgcacggatatccatacattggaagaagcaatcaaaggtgcagatgtattcctcggactgtcaaaaggaaatgtgctgagtcaggacatggtgcgcagcatggctccaatgcctatcgtatttgcactggcaaacccgacaccggaaatctcttacgaagacgctatggcagcacgccctgacgtattaatggcaaccggacgttccgactatccgaaccagattaacaatgtaatcggtttcccgtacatcttccgtggtgctctggatacgcatgccaaggcgatcaacgaagaaatgaaaatcgccgccgtacacgctattgccaatctagcaaaacagcctgtacccgacgtcgtgaatgcagcataccacgtgaacaatctttctttcgggccggaatatttcatcccgaaaccggtagacccacgcctcatcaccgaagtttcctgtgccgtggcaagagctgctatggaaagcggagtggcacgtaccgatatcaaggattgggacgcttattgcgtacacttgcgcgaacttatgggatatgaatccaaactgacccgccaactgtatgacaccgcccgccgccacccgcaacgtgtagtgtttgccgaaggcattcacccgaatatgctgaaagccgccgttgaagcgaaagccgaaggtatctgccatcctatcttattaggaaacgacgaagcaatcggcaaactggcggaagaactcgacctcagcctcgaaggtatcgaaatcgtcaacctccgccacccggacgaatcggaacgccgcgaacgttatgcacgtattctggcagagaaacgttcacgcgaaggctttacttacgaagaagccaacgacaagatgttcgaacgtaactatttcggtatgatgatggttgaaaccggagatgccgacgcgtttatcacgggactttatacgagatatagcaacacgatcaaagttgccaaagaagtaatcggcatccaaccgggattcaaacatttcggaaccatgcatatcctgaactccaagaaaggcacttacttcctggcagatacattgattaaccgccacccggatacaagcacattgattgatatcgccaaactgtctgacaaaacagtccgcttcttcaatcatacaccggtcatttcgatgttgtcatactccaacttcggcgccgacaccgcaggtagccctgtcaaagtgcacgaagcggtgtcatatatgcaggaagaatatcccgaactggctatcgacggtgaaatgcaggtcaactttgccatgaaccgtgagttgcgcgacgccaagtatccgttcacccgcctgaaaggtaaagatgtgaacacactgattttcccgaacttgagttctgcaaatgccggatacaaattgctgcaagcaatggaccctgacacagaatttatcgggcctatccaaatgggattgaacaagcctatccatttcaccgacttcgaaagctctgttcgcgacatcgtcaatatcaccgccgtagccgtgattgatgctatcgtagacaagaagaaaaaggaaagcaaatgagaaggccgttatcaaaatcacaaatagtttgtatcagtctactttggctggctctttgctatttggttcttacaaaagccgaacgaattgacggaatgacagtagtaatgcttgtcatttcggcagcattagtctttattcctgtctataagtcgatcaaaaagaataaataaatatctttttttctgcttttaatgcgataaaatatcaaatttgatgttttatcgcatttttctttataaaatgtttgttagttcaatttttatctttacttttgcaaccgcataagagaaatagataatcgaattttaaacaaccaataaaagaaaaaaagattatgaatgcagcaaaggtattagacgatctgaaaagaagatttcccaatgaaccggagtatcatcaagcagtagaagaagtactttctacgattgaagaagaatacaacaaacacccggagttcgataaagtaaacttgatcgaacgtctgtgtattcctgatagagtatatcagttccgcgtgacttggatggacgacaaaggtaacattcagacgaacatgggttaccgtgttcagcataacaacgcgattggcccgtacaaaggcggtatccgtttccatgcatctgtaaacctttctatcttgaagttccttgcctttgaacaaacattcaaaaactcactgactaccctgcctatgggtggcggtaaaggtggttccgacttctctccgcgcggtaagtcaaatatggaagtaatgcgtttcgtacaggctttcatgcttgaattatggcgtcacgtgggtcctgagactgacgttcctgccggtgacatcggtgttggtggtcgtgaagtaggtttcatgtttggtatgtacaagaaactgactcatgaattcaccggaacatttaccggtaaaggacgcgaatttggtggttcattgattcgcccggaagctaccggttacggtaacatctatttcttaatggaaatgctgaaaactaagggtactgacttgaaaggcaagacttgcctgatttccggttccggtaacgttgctcaatacacagcagaaaaagttcttgaactgggtggcaaagtgctgaccatgtccgactctgacggttacatctatgatccggagggtatcgaccgcgaaaagctggattatatcatggaactgaaaaacctctaccgtggtcgtatccgcgaatatgcagagaaatatggttgcaaatatgtagaaggagctcgtccttggggcgaaaaagcagatatcgccctgccttctgccactcagaacgaacttaacggcgacgatgccaagacattggttgccaacggtgtaattgcagtttccgaaggtgctaacatgccttctactccggaagcaatcaaagtatttcaggatgctaagattctttatgctccgggtaaagcggctaatgctggtggtgtatctgtatcaggtcttgaaatgactcagaactctatcaaactgagttggagtgcagaagaagttgacgagaaactgaaaagcattatgaagaatatccacgaagcttgcgttcagtatggtactgaagccgacggatatgtaaactatgtgaaaggtgctaacgtagccggatttatgaaggttgcaaaagcaatgatggcacaaggtatcgtataatcagcccataagatataagtaagctatagtttattaaaaactcccgctttcctaagggaaaagcgggagtttttttatgtaatgtaaatgtatactgacacctggatgtcagtaacatgcttttcttttatacaaattcgacctgttgaatattcatatctgtatgagttatgaattaaatcatacgattcttctataaaattaaatgtgcataattatcttacaccttacacttttgttatttaatcgtttgatacaaaaccgattaaacgagtgcaagataaggttacagatagtgtaagatacctttatcttacacttcttcggagattactttcctgattatttttgacggtagctttattttgtttcaagagcttaaaacagaatgttcaagagcttgaaacagaatgttcaagagcttgaaacaaagtgttcaatataaggaaacaaagtatttcaaggtaagaaactaaatgtttagttagtggaaacactttatttcactgtgggaaatatattatttacctatatgaacaagccatttcgtgaaggtccgcacattatgtgttctctattgatttactacgactcctattaagtgtaagacacctttatcttacactcatttaatctgttttatatcaaacgattaaacaacaaaagtgtaaggtgtaagatgattattcatttttaaagttcttcttcaaatttggtggtaatttaaccagtcggtggtatctccattcccctccttcggggaaggaggggtggctgaaagccggggtggtaggtggatacacaatgctgataataacagacttacgcattcacctaccacctccccctacggggactcctccttcccgaaggaggagaatggagaatactatcgattatcaaattattattttcctaattaagtttaccaccaaatttgaagaagaaccagttttaaaacttcatgatgaaaggatttgcaaatacgatcataaaaatgacctttgactgcaatatgattcgtttaaaacaagcatattagcacagacaaagaaataaggaaaaatacctgtctagatttcctttttaacattctatataaattggaaatcaacactttttaattacctttgcacccaaattatttttcaactaaaaattagactaatgaaaataaaaagtgtaatagctggaataatgttatgtctggcagtgacttcgtgcattcagaatgaagccttaaatgtagaagcagctatagacggatgtagtggaagcgatattcagcaatgtttaatcgatcctaatgagttcaccgtacaactatatgcatcaagagctgccgatccgtctaaaataaacattaacttcaaccttcctgccggagcttctatagtccctgttcaacgatttactgaagacggaattaacacctacaactttaaagacgagaatccgagattatttaaggttacatcagaagatggtgctttttcggcaatctatacaatcagactttggcaaacggaaatgccttttacatacgattttgagacactgagttcagacaacccttatcacaagtttaccgaagacaatccttcctcaggtaccataatccgtcgattggaattggctagtggaaatccgggattcgaattgacaaaaatggcaaaagcaccggatggttatccgacagtgcaagttaacggaggagttgatggtggtaaatgcgtgaaattggaaacaaaagataccggtagtttcggaagcatggtaaagatgtatattgcagccggtaatcttttcatcggttcattcgaagtaggacaagccttaagtggcaatgcaatgaaagctacccatttcggatttcccttcttttactatccgctcagactggaaggctggtataaatacaaggctggtcctactttctcatcaaaaggaaaacctgtagagggaagaaaagatgaatgtgatatctacggagtattatatgaaacggatgacaatgtacaatttctcgatggttcgacctcactcaattcacccaatattgtagctctggcacgaaatattaaagaacttcctgaaactgacatttggaaacagttcaatttcaaattcgaaccacagaatggtaaatctattgatccagacaagttgggaaaaggtatctataaacttgctattgtattctcatccagtgtggacggtgcgaagttcgagggagctgtaggaagtacactctatattgacaaagtaacgattgctcatacttccaatccggatgaatatgcgaatcaataataaaccaatcaattaacaagacaatgaagaaaataatatataataaagtagttggaatcgcattcttagcaatactttttacacaagctgcatatagtcagaatgaacgcaataaagcgctgatctattcttatttgcatggttgggaatatagtatcaaagcaggattcagcattggaggtacctcgcccctgcctttgcccaaagaaatacgtaatattgatagctatgctccaaatgttgctatctctatcgaaggaaataccacgaaatggttcggtaatgacaaaaaatggggaatgaccgcaggtatacgcctcgaaaacaaaactatgacaaccgaagctaccgtaaagaactatggtatgaagattatcaacactaacggaggagagctacaaggactttggacaggtggtgtgaaaacaaaagtgaaaaactcatatattactattcctttgttagctaactataagataagcgatcgttggaaagtatcacttggtccgtatttctcttatatgactgaaggaagtttttcaggacatgtatatgaaggacatttacgtacccctgatgaaactggtcagcgtgtcgactttagtggtggaagtattgcaacttatgatttctctgataatctacgcaaattccaatggggtgctcaattaggtggcgagtggaaggctttcaaacaccttaatgtatatgcagacctaacatggggactgaacgatatattcaagaaagacttcgatactataacatttgcaatgtatccgatctatttgaatattggtttcggatatgcgttctaaaagaactgtacatattatcttataaaaaaagccggaatgcattctacattccggctttttttataagatatgaattgatttattttttatatattacttctatatcatctacccataatttactctctggagctccccaaaatttatctccttctttactagatgaacaaacaatagcaaaacgatatttctgatttatatcaaactctgcgtcaccataatctaaagttatagtaaattctttccattgtccgtcagtacttcctccttcaactcctccttttgctacaacacgactagaagtataaaaattattatcaccagattctcctgtcagataatctgaaaaaccagtctcatcatattcttctgtagtatataaagatacctttatagaatattgatcagcatattcacctttagatacatctatggtagctttatcagttgcatctgattcacatgtatagaaatccttacctgattcatatttataccatccctttactgcaactggtcttcctaaagaattattaaattgattaccaaattttgtactattcagagtattactcgcattagtactccatgtccctagaaatagagagcctgttgttattgtaggtatcaaacctccaacaccacctttggaatttatagttctaagtaatgcactcttaccattatgaccttcactttcttcagtaactaaccaaccacttactcctaacataggtttaaatattcccatttctactatgccataattacttgtacaccatcctgttggagtagtaaaggtttcctcatccccaaacatcggtttatgtgtaacaggatcccactcttcaaaatcataactaactacaaaagcacgtcctgaaatagaagccgtataaattttagaacttccatcttcagctacgacagtaaaaatagctttatttgaagaaaaatccacagttgcaccacttgcaggtgttacagttgctttagcagaaacttcaatagtaggcaccaatttcttcaaatcatctgttgttacatcttttaaaacctcaaaaacaatagtcccgtcttcttcattgactattggttctgaaaaaacgacagcattagcttcaacagatttatcaaaagtaaaactcaaaattttagcctcagtactttctgttccagccaacttagttcccttataatcaaccttaacctgcaatgttccaccaccaactttaacgtcgacaatcattgcaagatttccactaccaatagtaccggaaaccgctacatcacagtctcctactaaaagagtcatcttttgattaccagaaaacttataagaagtaccttctaccgttacaggacagttttccacagcaatagtaccaagattaagttcctcactacctaaaaagaaaacaaaatctctcaattctaatttaacagcagtatcagaagccttagttacatagactttttgggataaaccggaagctattggatctggcacgccaacataatatacatccattgtccctttataatcacctgctatctcttgctcaataggaataactgtcggagtatcatcaccttcgtcatcactacaagatgtaaacaatgtcactgtacacaatacagcaaacagataataaaataatctcttgttcatttctaaattctctttttaattaataaaagcaaatgcgtgatattcccatcgcacacaaatgccaaaatttcacaggcgcaaagtaactattattttcacacacctgcaaggtctatttttcttgtttctgttctatttttaaagaaaagcgcctaaaatatcttataagataccgttttacgagtcaaaattataatttttgaaaagaaaaacagcccattaatcataatccatatatctttgtataaagtaaaaagtgtgagaaatgaaagaactacccaaaatagatttacccgaagaatggctcataggtacaggagtaaacaaggcattgcttagcttgtataccaactttccttgccgactgaaatcggaaatattcgtgctatgcatggagggagaaatcgaagcctcggtcaatctaaatcgcataacagtacgggctaatgacttcgttacaattatgcccggaagtattcttcagatacacagtgtcaatggagaaccgatgctttatttcggaggcttctcatcaaaatacatagagcaagccaatttacttccttcggctatcaacaccctatttataacgataggccgaccggttatttcattaaagccggaaggagccaaactactggcagaatactttcaattcttgataaagctatatgattttttcgacgaatcaacccgcaaaggaattactccgcacttgtataataatatacataccggaatagctgccatgtataacaaccagctacaaaacacgaaagagtattcgtctaaaagcgagttaatctacaaaaacttcactcaactggtgatacaaaattacaataagacgcgcaatgtagcatggtatgccgagaaactcaaaatatcaaatattcacctctgtactactgtaaagaaagtgacaggaaacacctgtgtcgaaatcatctcacacatggtaattatggatgccaaatcacaactgaaatcgaccaatatccccatccaggaaatttccaactcactcaatttcgccaacacatcattcttcggcaaatacttcaaacgatatgttggcatgagtccattagcatataggaatagcggataaacaacatcggtcttaattaacagaatcacttaatcttccggccttaaaacgacacccagttttttctttccgtccatcttgactatcatcggcttctcaaaacggacatgacgcaagaatttcgtttcgcctaccgccggttgggcattaaggaaatcctgatcgtaaacaccgtcattcataaaagcgttgatagtgaaatagcctactccgaaagaagtcaggttctggaagaagtgtgtgccttgactcggatctacgcggtaattagtcaaaccggcttccactatcacacgggcagcagaaatatgcggccatttcaccggaatacccaaccatgtatcgctgcttccccaacgtcccggaccgacaagtacataattcttaccttcattcaggaactgccggttgattttttctatttcccaagcaatagcctgattgttcgaagcactgtaaccctcagtctttacatagacaatatcgtgaatttcgttcataatgccatgtcccaacgaattataagaacgaaggataacgtcctcatcccgtatctcattcaaatcttcgtccaacatttccttactatccacaatcggccggatctgtaacaaataaaatgtgcctgtcttatcctgttcgcgactcatggtagccgcaaactcaatttcaaccggacggcgcatttcctgttcgccatacttcagcactaattgaagaatccgaggcaacgggaatacatcatgttgcagaatgtttgcaaacgtaatcaccttgcgtccgcccggatacaaaccgtcacggataacctgatcgtaaggatcgtatgtagaagcaatataccgcaaagctccatcgttttccgcctctttcacatgaagtttcagcaaattgaagccatcgtcgatagagaaatcatgccctgcattcttcaaatccaaggcatagaagcgggtctgggtttctttcagagctatttccatttcgctggtctgtaacacctgattggggtgataaggagagaaacgaagcgtcataccgccgtctacaatatattttcccaatcccagtgccagattgacggttccttcctccgctttttcatcacccaacggataataattcagcgaacgcgccacaccggacatggatggataataacggtcaccatactgattgccgactacttcctgcaaaataacggccattttttcctgatcgatcacattcgatgtagcctgcatataggctttactatcccgaaaataaacggaagcataaacgcctttgattgcatcggaaagcatacgcaacatctcataccgatcgtccagataaggaatcatataagtgttatagattccggcaaacggctgatagtgagaatcttccaacaaagaagaagaacggatagcaataggcgatttcaccacatcaaagaaagtaaagaagtcctctaccagtctgtccggcaattttgctttcaggaaatatcgcaatatcgtatcatcatccgcatccgaaagcgcaatctgatacagattgttaatgtccataaattcatcgaatacgtccgtacaaagcaccactgtcttaggaatggcaacacgggcattctcaaactcttcaaattcgggataacgtttcaccatattatctataaaagccaaaccgcgtccctttcctcccaacgaaccgtcaccgatacgggcaaagttggaataacggtcgaaacggtcacgtttaaagacggcaaccactccctgattcttcattttacggtatttcacaatcgcttcaaagataatccggcgatgcgcatccacgtcctgaaggctgctccacgtaataggtttcaaaaactctgccaccgggaacatggcgcgtgaataaagccagcgtgacacatgattccggctaatatgatacaagaaagactcggcaggcacagcgaacaggatattctgcaattctttcagattacgtacacgggcaatctcctcccctgtctccggattacggaacacaaagtcgccgaaaccaaagttatcagaaacgatacgccgcaggtcgacgtccattttcttggagttcttgtcgataaaactagcgccatactttgctgcatacgaagcgttctctgattcggaagactggataatcaacggtacaaacggatcattcttacgtatctcagcgcataacttaatacccgccagaccgtctttttcgccacgctccaccttcgggaaacgtacgtctgtgataacacctaatatattgttctgatatttacgatagacctccattgcctcctgatacgtgcgtgccagaacgattttaggacgtccacgcatacggagtgtacgctgatgcgcattcaacgcctcggtagaaaattcctggctttgctttagcacgaatttatacaagttgggaagaatggaggaatagaaacggataccgtcttccaccaaaagaatcaactgtacaccgacttcctgcacatcatgttccagattcatcttatcctccattaacttaatgatagaaaccaacaaatccgtattacccagccagcagaatacgtattcgaacgcactcagatcttcgttgataatcctctttgtaataccatggctgaaaggagtcagaatgacaataggaatatgctcatatttctctttaatgtgacggccgatgtcgaaactgtcattatcacccgtactcggcatacaaatcaccaggtcgaacgacatattctccaattgcgtcaaagcctcttcctccgtagatacttgtgagaaacgcggcggataacgcaaggacaaagaggtgtattcattgaatatcttttcatcaatacgtccgtcatcttccaacatgaaagcgtcataagggttggctattaacaacacgttgaaaatccgcctggtcatcaggttggcgaactgcgtatctttgaagtaaagctggtttaatttatatttactgagcataaaattattctcctttcttattccaaatcatcatgtttccaaaatccggtttgcaaagttaattttttaaatctcattttctatcatcttctttataaagtttacttgcttatctcttattattttgtagatttgtaacattaagtttatcctcgatttttttattcacatgaaaaaagtaacattattaatgtgcgaatactataagctccttagctagtatccccaactctatcattttatcattatttaatcaaaatatagccataaaatcaatcacatttgaaaacttttcctatatttgcagtatagttagttgacattttatcagaacaacctttttaaaaacatactattatgaacatccagaaaatcatgtcctctttggaggcaaaacatcccggtgagtctgaatatcttcaagcagtgaaggaagtacttctttctatcgaagacatctacaatcaacatcctgaatttgaaaaagccaaaatcatcgaaagattggtagaaccagaccgtatttttactttccgtgtcacttgggtagacgataaaggagaagttcaaacaaatctcggctatcgcgtacaattcaacaatgcgattggtccgtacaaaggtggtattcgtttccatgcttcggtcaatctttccatccttaaattcctcggattcgaacagacgttcaaaaacgcgctgactaccctgcctatgggcggaggtaaaggaggttcggacttctctccacgtggaaagagcgatgctgaaattatgcgtttctgccaggcatttatgttggaattgtggcgccatttaggtccggatatggatgtgcctgccggtgacattggcgtgggcggacgtgaagtaggttatatgttcggtatgtacaaaaagctgacccgcgaatttaccggaacatttaccggtaaaggactggaatttggcggttcgctgattcgtcccgaagctaccggtttcggtggtttatattttgtcaatcaaatgttgcagacaaaaggaattgatattaaaggtaagactgttgccatctccggttttggtaatgtagcctggggagcagctacgaaagctaccgagttgggtgcaaaagttatcacaatctcgggcccggatggatacatctacgacccggacggaatcagcggcgaaaagatagactatatgctcgagttgcgttcttcgggtaatgacattgtagctccttacgctgaacaatatccgaatgctacattcgtagaaggcaaacgcccgtgggaagtaaaagcagacattgcacttccatgcgcaactcaaaacgaattaaatggagaagatgcacaaaatctcataaaaaatgacgtactttgtgtcggagaaatttctaacatgggatgtactcccgaagcaatcgatttatttatcgaacataaaacgatgtatgctccgggtaaggcagtcaatgccggcggtgttgccacttccggcctggaaatgtctcaaaacgcaatgcacctgagctggagcgctgccgaagtagatgaaaagcttcatgcgatcatgcacggcatccatgcccaatgcgtgaaatacggcacagaacccgacggatatattaattatgtgaagggtgctaatattgccggatttatgaaagtagctcacgcaatgatgggacaaggcgttatttaaaaagactttgtttagttgtatttgtatttgtggttttgcgctactcgcctcctgtgacaggacgcgggtagcgctatttttttgagattaacattattttcaatggaattaattatctttgtggcataataaggtaaataatagattatgaatttgttgttcacagtaaacaactcacaattaatgatttactattagcaattgtgtaattattaatcatgtaacaaatataaaatgctacaacccgaattaaaacttcgccgcgataagattcgcagtctgatggcgttacagggcattgacgccgcacttattacttgtaatgctaatttaatttacacgtatggttgcgtagtcagtggttatctctatctcccactacactcacctgctttactgttttttaaacgtcccaacaatatcacaggagaacattcattctcaatccgcaaaccagaacaaattgtagatttgctaaaagaaaaaggattgcccatacctgccaagttaatgttggaaggtgacgaactcccttactcggaatattgccggttggcaagcttgtttcctgaaacggaagtagtcaacggcactccgttaatccgccaggcacgtagtgtaaaaactgccattgaaattgaaatgttccgtcgttcgggcattgctcacgccaaagcctacgaacaaatccccagcgtataccgccccgacatgacggacatcgaattttctatcgaaatcgaacgtctgatgcgtctgcaaggcaatttgggaatcttccgcgttttcggacgtagcatggaaatcttcatgggtagcgtgctgaccggagacaatgccggatacccctctccatacgactttgctttaggtggccaaggcctcgaccctgccctgccgggaggggcgaataaaaccccactgaaagaaggccaaagtgtaatgattgacttaggcggcaacttcaatggatacatgggtgacatgagccgtgtattctctattgggaaattaccggaggaagcgtatgctgctcatcaggtctgcctggatattcaggaaaaaatcgcttctatcgccaagccgggtattccttgcgaaaccctttacaacactgccatagaaatggtgaccgctgccggatttgcagataaatttatgggcacgcaacagcaggccaaatttatcggtcacggtatcggactcgaaatcaacgaggcacccgtgttagctccccacatgaaacaagaactggaaccgggaatggtctttgctcttgagcctaaaatcgttcttccgggtataggtccggtaggaatagaaaactcttgggtagtaacgaacgaaagaatagaaaaactgacgaactgtaacgaagaaattattgagttgaaatagtttatattcaaaaaatatgctgacaaatccgggatatatcaattaatgccaaaaaacaacttccggggtattaatataaagcaactttactctctattttttttaaagaatgagaataaagttgctttcaatgattaaatatactatattagcgtcttaaaaacacatggacaataaaaaattaaacaccttaatcaatataaatttaataaaacaatgaaacaacctttgctttttacccttttatcttctgctgcctgtgtggccacagccgcagacaaagcccccaaacaaaccacccccgaaaaagcaaaaacacccaacgttgtgtttatctatgccgacgatctcggttatggagatttggaatgttacggagctaaaaacgtacaaactcccaatgtcaacagactagcaaaatctggtattcgctttactaatgcccacgctactgctgcaaccagtaccccttcccgttattccatgctgacaggagaatatgcatggcgcaaaaaaggaacagacgtagctgccggaaatgccggcatgattatccgtcccgaacaatataccatggcggatatgttcaaaagtaccggttatgctaccggagctatcggaaaatggcacttgggattaggagacaaagccggtacacaagattggaacgctccactgccatgtgcattgggagacttaggatttgactaccattacattatggcagctaccgctgaccgtgtaccttgcgtatacattgaaaacgggaaagtagccaactacgatcctagtgcacctatcgaagtaagctatcaaagaaattttgaaggtgaacctaccggaaagagcaatccggaaatgctttataacctgaaacctagtcacggacacgatatgtctatcgtcaatggcatttcccgcatcggctttatgaaaggtggaggtaaagctctttggaaagacgaaaacattgctgactctctgacaacacatgccattcagtttattgaagaaaataaggataaacctttcttcctttattttgcaacaaatgatgtacacgttcctcgtttcccccatgaccgttttagaggaaagaacccaatgggactgagaggtgacgccattgtacaattcgactattgtgtcggtgaaattctgaatacacttgaaaaactaggcttgagagaaaacacattaattattctttcaagtgacaacggcccggtagttgacgacggatatgatgataaggcggaggaactccttaacggacacagccctgcaggaccattaagaggtaataaatatagtgcatttgaaggagggacccgtatcccggctatcttaagctggccgaaagaagtgaaaaaaggtaaaacatcggatttgttggtttctcaggtcgattggttagcttcactggcttctctgaccggggctgttatgcccaaaggcactgcacctgatagttacaacttcctgggaagctggctaggcaaagaaaagaaagaccgtccgtgggtaatcgaacaagcttccaatcatacactatctgtccgcacaaaagattggaaatatatcgaaccgaatgggggaccgaaaatgatccagtggggaccgaaaatcgaaaccggtaactcaaaagaaccgcaactgtataaaatggaagaagtgaaagaagtaactaattatgcttctcaaatgccagaaaaagtggcagagctacaaactatccttcagggtgtacgcgaaggaaaagaccttatcggcaaataatttaaacaacccatacaacatttaattacgtaacattatgaattacaaatctatatcattaataagcggcacattactcctttccactctctccgccaacggacagaaaaaggattccaaacccaacattatatttatcctctgtgacgacatgggatatggcgacttaggatgctacggccagccattcatacgcactccccatatagacgctatggcaagcgaaggaatgcgcttcacacaagcgtatgcaggcagcccggtcagcgcaccttccagagcttcatttatgacaggacaacatacaggtcactgtgaagtacgcggaaacaaagagtattggggaaattcacccattatcatgtacggaaacaacaaagaatattcggtagtgggacaacatccttatgatccggatcacgttatcctaccggaaattatgaaagacaacggatataccaccggtatgttcggtaaatgggccggaggttacgaaggatcttgctctactccggacaaacgcggcatagatgaatattatggttacatttgccaattccaagctcacctctactaccctaatttcttaaaccgatatagtaaagctctgggcgatacaggagtagtacgtatagtaatggacgaaaacatcaaatacccgatgtacggtcctgaatatcagaaacgctcgcaatattctgccgacatgattcacgagaaagcaatggaatggctggaccaacaggataccaaacagcctttcttcggcatatttacctacactttgcctcacgcagaactggtgcaaccggaagattcgatcttaaacgagtataaagcaaaattcgatccggataaggtttacaaaggaagcaaaggttcaagatacaatgctatcacccatacacacgctcaatttgccgccatgattacccgcctggactattatgtaggggaagttttgaagaaattgaaagaaaaaggattggatgaaaacacattagttatcttctccagcgacaacggccctcacgaagaaggaggagccgaccctactttcttcggtagagacggaaaattgcgcggactgaaacgccaatgccacgagggaggaatccgcattccattcattgcccgttggccgggacacgtaccggcaggcaaagtcaatgaccacatctgcgctttctatgatttaatgcctactttctgtgatgtggccggcatcaaaaattatgaaaagaaataccgtaataaagaaaaagaagttgactatttcgacggaatttctttcgcaccgaccttgcttggcaagaaaaaacagaaacaacatgacttcctgtattgggaatttaacgaaaccaaccagatagcagtgcgcatggatgattggaaattaatcgttaaaaaaggaaagccgttcctatataacctaaagacagatattcacgaagacaacgatgtggcactccaacatccggatatcgtagaaaagttgaaaaaagttatatttgaacaacgcatacctaacccatatttttctgtgacactgcctaagcagtaaccagatcaacaaaacaagaaaacagtgaacactgtatggagtagattcattaagtgttcactgttttcttgtttatacagatttagacttatacaaatagtaaaaacaaccgccaattagtcaagtggtttcaatcccattttcgcagctctttccaacataaaggcatgagcggcctcatattcattcgggataactccatccaatatagcatctttaatcgcacttttcaaagccccgacttcacggcaaggctgcaaaccgaaggtttccatgatttcctccccacttaccggaggctgaaaattacgaatccggtctttctcctccaagtctttcaatttctgacgaaccaactggaaattattcaagaaacgttgcttacgctccatattctttgaagtaatatccgcttcacacaaagtcatcaaatcatcaatatcatctcccgcctcaaaaagcagacgacgaacagccgaatctgtcaccacgtcatccgcaatcacgattggtctcatgtgcagactaaccattttctgtacatacttcatcttctcattcatcggcaacttcatcttacggaaaatattcggaaccattttttcaccgatgaaattatggttatggaacgtccagccagcttttggttcccaacgtttagtggcaggtttggcaatatcatgcaacaaggcagcccaacgcagccaaagattatccgttttcttgctgatattatcaagtacttccaacgtatgataaaagttatccttatgcgaacggccattccgtgtttctaccccctgcaaagcagccagttcgggaaagattaacgacaacaacccactacgctccaagtcaataaagccctttgaaggaacaggcgaaagaattatcttattcaattcatctgcaatacgctcacgggatatgatgttgatccgttccctattacggcaaagcgattcaaaagtgtcatcatcaatgtaaaaattcagttgggtagcgaaacggatacagcgcatcatacgtaacggatcatcactaaacgtaatatccggatcaagaggagtacgaatcgtcttctccttcatatcttccataccgccaaacggatctaccagttccccaaaacgtgctttattcaggcaaacggcaagagcattaatcgtaaaatcacgacggttctgatcatcttccagtgttccgtcttccacgataggttttcgtgaatcccgatgatatgactctttgcgggctcctacaaattctacttccgtgcctttatattttacttgtgccgttccgaaattcttgaaaacagagacatgagcaccacgtcccagacgttttccaagtgcttctgccatagcaattccactgcctacaactactacatctatatctttagagggacgttgcagaaaaatatcgcgaacgtaaccacctaccacatagcactctaagcccagtgcatcggcagtttcggctatttgtccgaagattggttcgctgaaatgctgcttcaattcctcttgagtcaactctatcattccttttagttataagttttgagggggcaaaattacaaaaataagggatatatttgtatttttgccgctaataaagtaaacgaaggatgatgaacaataaaatatatacagtatgataaaaaaactgatttacctcttttgcggcacattagtgctgacagcttgcggaaatagcattgaaaaaaaagcgaacgagaaactggtgattgctaaagccgcttatgaacgtggcgactacgaagaagcaaagtctcaaatcgacagtatcaaaattttgtatccgaaagcattcgaagcgcgtaaagccggtcaggaactaatgctggatgttgagacgaaagcacaacaaaaaacacttgcgtatctggacagtgccctgcaagtaaaacaacaggaatttgatgcaatcaaagacaaattcacgctggagaaagatgcggagtaccagcaaataggaaattatctgtggcctacccaaaccgttgaaaagaatctgcaccgttcatttctacgctttcaggtaaatgaacaaggtatcatgagtatgacttctatttattgtggcagtaataacattcatcacgtcggtgtcaaagtaattgctcctgacggtagttttgcagaaactcctacatccaaggacagttatgagacagtcgatatgaacgaaaagatagaaaaagcggactataaactcggagaagacggaagcgtaatcgaatttctgaatctcaataaagacaagaatatccgggttgaatatctcggtgaccgtatttacaaaacggccatgagccccactgaccgtcaggcagcagcaaatatctaccaattatcacagatcctttcggcaatgcagcaaatcaagaaagaacaggaaactgcgaatctgaaaatcgagttcatcaataaaaagaaagaacggaaagcacaggaaactgcaacagagcaatagtcaacagcctatcataaactgtaattctaaaataaggaggagccggaggataataaaaatctccggctcctccttatttcatttttaagaacacatacttaaaaataccaggcaaatcacttcattatatgtttgccgtaattccaccctttgagatcatacaatacggcatccttacgaatccgttccttaaaacttacataatcccttttctcctgtggagtccatccggcttccgcaacagccgcaagacgaggtaacatcagatattcaagtacagaagaatcaaccacccattcagtccaaaagttagcctgcacaccgctataataaggttgcaagtctgcctccactcccttcatcggctgataattataaacggcttccaccgtctcggtaccatgtccctgcgacataggttccgtagggagatcagattgcctcctgtttatataataaggaatttgtgggcttaaaattgtactcataccttgttttgctgcattttgagccgcagcatcagcccctatccatgccataatggtgatgtcattacctaggagcgcagtatttccgtggagtacttcattccaaaacaccagtcgtcgttgttggttggcaggtttcgtggccatataatcttttagttgtttatagaaataaatctgtaaatctctaaaattagtagagcccatttcttttagtaaggactgacactcttcgtttttctgccatttattagtaggacattcatcaccgcccaagtgaatataacggaatggaaacaggtcgataagttcatcaattacatccctggcaaattgcatggcttgaggattagctacattgataacatccgtcgaaatgccttgccgtagccacacctcatgcatattttcaggatcacaagccagaaactccggataagcggcaacagcagcctgggaatgtccggggatatctatttcaggaataatctccacaaatttagttttggcgtaagctacaatttctttgatgtcattctgggtataaaatcctccataacgctgcccgtccgttttcacatcgccatacgccaaaactttgctattccgccaagcacctacttccgtcaacttgggatacttctttatttctattctccagccctgatcttcagtcaaatgccaatgaaaacgattcattttataagtagacatgatatcaatcacccgttttacctcatcttttccgaaaaagtgcctgccctcgtccagcataaagcccctccattcgaaacggggaacatcttctatttctacggtcggaatactccactcctgccggccgcctactgccacccctgccattacatgacgggagattaactgcttcaatgtttgaagtgcataataaaacccggcagggcgcgcagcttcaatacgaatctgttttggcgaaacatccaacttataagcctccggtgcaagcgtttgattcacacttaaaacgattccagccttagcctcactacgcacagacgtaacttttatgcccgtagccttttggaaatcatctttaaatgaatcgaaaacaagagtaacgctatcaccccgataagaagcgatacagactttgagctgcttaccgaatttaaaactttcatttttcacgatcaaatgagccggttgcggaatgatagctatttcttgtgccatcaagactccaaacccgcttactatcacccataataaagataaaagatacttgtttttcatattagaattattttatttcacccttctgttcaactgattattagccttttcctgtttcgacttcccgactctttttcccgaagtttttttctttccgactccgggttttgcctttccggcaaagggattattactttttttgattaccatactcttctcggtatttctactaatttactccccttcgtaatactctcccaagtaccaacgggccacaaaatcccaattctcgtgaagcagagcctttccattctcaaacgggaactgggcctccggcaataagtcatgttccatagcatatttcaacaaatcgaatggacacaagccttcttcacaaaacagttcgtacgcttcctcctccgcttcttcagcactataaagcggattatgcttatctgcaaaataagaagcaacatccggccctatcaacagacctttcggattggcatataacacaaagttatcaaactccttcaaatcaggtaaaagagaatcctcttcgtcctcccatttcagtgcttgcacaaaaaagactttcaatgcctcataagaatcaaagaacattaatgcctctcccttgcttgcctccaaaaagcgttcgacattcgtaggtaacttttcaccgggtacggcagtaggcaacggctcccgttttctctgcatcaattccgtttccattatccagtccacagccagattctcactgataagagcctcttcaaaaacagcatccaagcggttatagattacatccgcaaacttcaacaaatcttcatccaacggattttccactccatcgaaagagtcacctaccggagaattgacagcccacaaaagaaaagcgacatcctcacgatttatctcgtcaggcagatattcgtccgtcaacgaataaaaaggaaggtaacgtccgtaacttttctgatgccaacggataaattgtctccagtttcccccgtcagccacacagtcttccaaatacaaagctagtattaaagcaacctgctgttgatcttcctccgcagtcccccagtataaactagattctgccaccaaaggcagtaattcattgacaaaatcaagataccactggtccgtagctaccacctttacacgacgatgagcctccagccatgttttcatataaattttccgttgcttcataatctcttcaaagccagtttaatcaccttttctaccggggcttccggttcttcctttaaaacagccagaacaaccttctgcgaaggtgcggcagcaaaacccaacattgtcaacgcagccaccgcttcttcctgcacttcggcattggcagactgcaacaacattccggcggatgttgttccgcctacggcagccattcctaccgtctttatcttatctttcagttcgacaatgagacgctgtgcagttttcagcccgatacctttcaccgtcttcaggagattcgcgttttcagcactgattacactgaccaactctgatggagaaagagcagaaagaatcattcgtgccgtatttcctccaatccccgacacagaaatcaataatagaaaaatctcccgttcctgtttgtcggcaaatccgtaaagcacgtaagcgtcttcacggatagcttcataaataaataatttacaagttttcttcccctgaatagccgaataggtattcagagatatattggcggcataccccaccccattacagtctatcactgcggttgccggactgagttcggcaagctcgcctctaacatattctatcataatgggaacaaagataaaacaatttcaccacagaggacatagaggacacagagttttttcaatgagatgatagcacactaattaaagaattacgttatttttgttcatctagtttgacgttcgcaacaaatatattcattactagtgaaaaaattaaaaataattaagctaacgaaccaaagctactagtaaaatgtttatttttgcaagcaaaagaaagaaatttgttcactaaaaccaataaaaggatgaaaaaagtaagagctgccatcgttggttatggcaacattggtcattatgtacttgaggcgcttcaagccgcaccagatttcgaaatagccggagtagttcgtcgtgcaggagccgagaataaaccggaagagttggcaaattatgcagttgtaaaggatataaaagagttggaaggcgtagaagttgccatcctttgtactccgacccgcagcgttgagaaatatgcaaaagaatatctggctatgggaatcaacaccgtagacagcttcgacatccacaccggtatcgttgacttacgacgcacactggatgctacggccaaagaacacaaagccgtatctatcatctccgcaggctgggacccgggaagcgactctatcgtacgcactatgctcgaagccattgctccgaaagggatcacttataccaacttcggtccgggaatgagtatgggacatacagtagccgtgaaagccattgacggagtgaaagccgccctgtctatgactatccctacgggtacgggaatccaccgtcgcatggtatatatcgagctgaaagacggatacaaatttgaagaagtatccgcagctatcaaagcagatccttatttcgtaaatgacgaaacacacgtgaaacaggttccgagcgtggacgcccttctcgacatgggacacggagtaaacctcacccgcaaaggcgtatcgggcaaaacccagaatcagctatttgaatttaatatgcgcatcaacaaccctgcactgactgcacaagtactggtatgcgtagcacgtgcttccatgaagcagcaaccgggttgctacacaatggtggaaattccggtgatcgacctccttccgggtgaccgcgaagaatggatcggacatctggtataaaacatgatccacataacagataaaaaaaatagagaaagactgttaatctttctctattttttttatctttgtccgaatactaaaaacacgcacaagattatgaaaaagctattcattctatttacactcctgttacagcttttgtcacccatttacccgcaacaagccgcaacagtaatcactcccagtctgaaatacggtaaaccctccaaagaagaactcttgttcaccacttatactccggatactactgccacagccctctatctgttccaccaggggcagagcaactttacctaccacgatggttttcaactgataacagaacactggatacgcataaaaatcctgaagccacagggaacggcatacgccgatgtttctgtcccgttttatgcccctacggataaagaggaaggagaagaaagggccagcgaagtagaaggttgctcttataacatggaaaacgggaaatgtgtaaaaacacctatgaaacgcgaatccatatctttcgaacggattgacaaccgatacaaaattcttaaattctccctacccgctgtcaaggaggggactattatcgaatatcactacaagctctactccgactacttcatccacatagataactggatgatgcaagaagaactgcccatgctatacaaccaatacaaaatcacaattcccaatgtattcatctacaacatcgaacttcggggaaaagactacatacaaatgaaacaaaaagaatctgcccttcacgcaacggcacgtgaaggtggaacggcaggaatcaacaaagatttcactatcctggcacaagaaacgacattcatttctcagaacctcccagctatccgtcaggacgaaccctattgctggtgtccggaagattataaagtacaaataagttttgacctacaaggtaccaacttccccggcaaagaatacgaaccatatagccagaaatgggaagatgtagataaacaactgattaagccggagaatacacaattcggcgtgttcctctctttcatcaacccgttccgcccggagaccaaagagatttttaccagcaaaatgaattttgaggaaagaatcatccactcattccgtctgctaaaaaagaaactggcttggaacggaagatataatctttatagcaaagacctcgaaaaagtaattcaaaaaggaagcggcagcaatgctgatctgaattttatcctaatcagcatccttaaagacttcgggctgaaagcctaccctgttgttttaagccgccgttcagcaggaatgttgcctcataatttcccgtctctgcaaaagcttaataccttcgttatcgccgtttacgatacggacaaagaaaaatacgtctttttggacagttcaatggatattccttctcttaacattctgccgcccgacttgtctgttaaccaagcacgcatactttcgccaacagaaaaggaggagaacaaatgggtagacttaatgatgctcacagaaaacacaagctttatgaacattaaagctaaattagaaggtaacctaattaaaggacaccgcagtacagtcttgcacggacaggaagcggtggaataccagaaaaagagacaacaagaacaagacagtatcgttccagacccgacaaccgaaattaccccgaaagacaggctaaccgtcaccaacctaaaagtggaacatacggaaaacgatccgggtacgataaaagaggaactcgacttcaccatacaaaccgaacaggtaggtgatcacctctacatcaatccgatgcttttcccacaactggagaccaatccatttattcagaccgaccgagtgcttcctgtcgaatttccatatccgtataaattcacattattatgcaaattggcccttcccgaaggctatgaagtggaagaactaccccaatcgcaatttatccgagcagagggggatcatctgcaatgcagatatatggttcaaaaacaagggaatacgatcctggtcagctacagattccacctcaaagaatatatattccttcctgaacattataaacaactgcaagatatgtggacaaaaatcattgagaagaatcacacgttgatagtactcaaaaaaatataagaaaaatcattcaatattctgataatgaaaaaatcagcaatgaaaatcatcggattattattcggtctctacctcggttctatcatgtctgtacaggcacaagacctttcaaaagacgccacttctattataacggattcgcggacggaagtcctctgcaaatcaatgacgcaatctatcgaaaaagaaagccgcacgattctcattcttaaccgtaaaggactgaatgctgcatacttcgtctgtgaatgcgatatgttccgttccttacagaagttctcgggagaaatacttaacgcatccggtcaaagcgtccgaaagataaaaaaatcggaactgcaaaagagcgaatatagttcctcgttaagcacagatgactatgcctattattacgaatgtaacttcccctctttccccttcaccgtaaaatatgaatgggaaataaaatgtaataacgggcttatcggctaccagtccttccttccgcaaacagactttcagcaaggagtggaacaagcgacataccggatcgaattgcctgccggacaagaatgcaggtaccgcgagctaaacactggaggaaaaaatatccaagtgacaaagtcgaccggtacggacgggcagcaagtgattgaagtcaccgcttcgaaactgctgccggtacagaaagagccgttcggtcccgatttcgcaaaattgtttccacggatttatttcgctccttccgctttcaaatatgacaaatcggaagggaacatgagtacttggcaaaaatacggagaatggcaatacaaactactcgacggacgcgacgaactcaccgaacctttccgcaacaagttgcacggactgactgctcactgctctaccgaccgcgaaaaagtaaaggcaatttatgactatctggcaaaaactacccgctacgtcagtatacagctaggtatcggaggattgcagcctatcgcagcatccgatgtctgccgcaccggatttggcgattgtaaaggactttccaattacacccgtgccatgctgaaagaaataggcataccttctacttatacggtgataagcactaccaacgaacgcctgttgcctgatttctccagcgccaaccagatgaatcacgtcattctgcaagtacctctccccaaggacactctgtggctggaatgtaccgatccatcgcttcccttcggctatatccaccaaagcattgccggacatgacgcattgcttatcgaacccgccggtggcagcatacatcgtctgcccacgtatcccgattcattgaacacacagcacatcatagctactatcaccctatcgcctacggcagaaacacaaatagaagtgaacgaaatatcccgattattccagtacgaaaatgaggcaggaatcgtttatttggaacctaacaaacagaaagaccacatccgttcgaccctcaacctctcgcaagccgacatccttcgcctgcaaatcaaagaatgtaaggaagcgaatccatctatcactttcagttatacggcaagcagccagcaatacggttacaaaacaggaaaccggctgttcatcccgactaacatatttaaaaaaggattcagtgtacctcgtgccatcaaccggaaatatcctatccatattaactacgggtattcggacactgatagtatctgcatcaaactacctgacggatatatcgtggaaggacttcccaaaccaatcgatctaaaaagtaaattcgggaactttcattccagtatctatacaaaagacaataagatatatattgttcatcaactgtttatgcgtaaaggggtatacaagcccggcgaatataccgctttcctcgatttccgtaaacaagtggcggaacagtacaatggaaaaatcatattaaaaaaagaataagatgactacttacagaaaataaagtatctttgtaacttcaacaaagtacgtaagaaacattgaaaaacaaaagatacagcaacggagaagaatgggcaaacacgctcagtcacggagcaggcatactgcttggagttatcgcaggttacttcctgctagtgaaagcaaccgaaaatgccgaaccgcaatgggcagtggcttgtatttctgtttatttgacaggaatgctttcatcctatatcagttctacgtggtatcacggtacgcgtccgggcaaaacgaaagagctactccgcaaattcgaccacggagccatttatcttcacatagctggcacatacacccccttcacattactcgttttgcgtcaggcaggcggttggggctggggtattttcgccttcgtctggctgtcggctatcgccggtttcattttgagtttcaaaaagctgaaagaacacagtaatctggaaacgtgctgttatgtggccatgggagccagtattttggtcgctatgaagcctttaatggatcatctggcattgctgaatgccaccccggctttctggtggctgataggaggaggcgtatcttatattacaggtgccgtattctattcattgcgcaagccttatatgcacgccacctttcatctgttctgcttgggaggaagtatcgggcacatcatagctatctggctgatattatagagggagacataacgattgtagacatacagacaaaaaaaaggctatctatcccagacagccaatcttttttgttaaccttaaatctaatactatgaaaaacacattgcaaagatacggactttctgcatatctccaaattttcaaggcaaagtagggcatcttataacatggtttaatagaatacaggcaaccgttaacaattaacggaattaaatttaaaaattaactaaaaaggcagaagacagttattcgattatcaaaaagcaagattgaaccaaacatcctcatccggttgttatacatatttaaaatcatcgagaatgtaagatcatgaaccgggaaaaatcatctgataaagaatctgcaatggtcggattcaattatcaaccgggaagcgaaagaacgtatagcatgcgaaattgcgaccatgccgaaagatggaccggttcttaccgaaaacggcaactttatccctgatactcgttttcattacattgactcttctttggaggaacaagtgaaggcaatcaccggagcgattgagagcgagctgttcatcggatatgatgtagaaataataacggcagaataagacaaagaagatattttttatttttgtacggaacataagaaaataatttcgcacctttgcagcccaaataaaggaaagcacaccgaatcatgtccagtttcgagaaaagaaacaggcaaaaagagaacacttcacgagttaaattcagaaaaaagttttccaaaacggaaaagtttctgtatcagcaagaaagaaaagtttcccgaaatttaatgttaaaaggtaaccgggatattagattatcacttatctttgtatccggtttcggaactaaaaagaggtttagtcaatgagggaacgctgtgcaaatcggcgacagtacccgctgctgtaattctctgtgaatccgcacactatgtcactgcatcggctgatgtgggaaggcgttgcgagggagagataagtcagaagacctgccggaacaaatcaaccatattattaatgtctaacactttcgggagttaaagttatgaactacgcggaaatttgtatcatcaaacgtgatggtaaaagagaagatttctctatcagcaagattaagaatgcaatcagcaaggcattcagtgcgacaggcattcaggatgaacagcaattaattgctgatatcacgatgaatgtaatcagccagtttgccacccctacgattaccgtagaggaaatccaggacttagtagaaaaagcattgatgaaggtacggccggaggtcgccaaaaagtacatcatctaccgtgaatggcggaatacggaacgagacaagaaaacccagatgaagcacgtcatggatggtattgtcgctatcgacaagaacgatgtaaacctaagcaacgccaatatgagcagccatacacctgccggacagatgatgacatttgcatcggaagtaaccaaagattatacttataaatacctgttgccgaagcgttttgccgaagctcaccaactgggagacattcatattcatgacttggattattatccgacaaaaacgacgacttgtatccaatatgacatggatgatttgttcgaacgcggtttccgtaccaaaaacggcagtatccgcaccccacaaagcattcaaagttatgcaactctggctacgatcatcttccagacaaaccagaacgagcagcacggcggacaggcaattcccgccttcgactttttcatggcaaagggtgtggccaagtcattccgcaagcatttatcttctttcatcaatttctatgtggccatggaaaacggtatacaggccgatgaaaaagcgatccgcacactgattaaagaatatctgccgtctatccaatccgatgaacgggaacgggaaacgttacgcatcgccctgatagccctgcaaatcaatattgacaaagagcacttggcacgcatcatagaaaaggcataccaacagacacggaaagatacgcatcaggcaatggaaggatttatacacaacctgaacacgatgcattctcgtggtggtaaccaggtggtattcagctctatcaactacggcacggatacttccgctgaaggccgcatggtgattgaggagctactgaaggccacgattgaagggttgggaacccgtggtgaagtacccgtattcccgattcagatcttcaaagtgaaagacggagtttcttattcggaaaaggactatgagaaggctatgaaaatggaaagcatcgaagaggccatgaaagcaacttacgaagctcctaatttcgacctgctgctgaaagcctgccagacgacatcgaaagctctttttccaaatttcatgttcctcgatactcctttcaacaagaacgaaaaatggaaagcagacgacccgaaacgttatatttacgagctggcaacaatgggttgccgcactcgtgtgtttgaaaacgtagccggagagaaatcgtctttaggacgcggcaacctttcattcacaacactaaatatgccccgactggctatcgaagctcgtatcaaagctgaaaatctgatagaggacgaacgcaacaaagacgctatcgaacagaaagcgaaagagattttcatggaatcggtacgtaacacggctactttagtggccgaccagctttacgaacgttatcaatatcagcgtacagcccttgcacgccagttcccctttatgatgggaaatgatgtatggaaaggcggcggcacactgaacccaaacgaacaggtaggtgacgtgctgcgtagcggtacactgggaatcggattcatcggcgggcacaacgcaatggttgctctctacggagaaggccacgggcatagccaaaaggcatgggacacattgtacgaggccgtaacggaaatgaacaaggtagcggatgaatataaagcgaaatataacctgaactattctgtactggctactcccgccgaaggtctttccggacgtttcaccaaaatggaccgccggaaattcggtaaaattccgggagtaacggacagggactattatgtcaactcattccacgtagacgtgaaagagcctatcagtattgttgaaaaaatcaaatgcgaagctcctttccacgctattacccgtggcggacacatcacatatgtggaactggacggagaagcacagaaaaatgtacgtgccattgccaaaatagtaaaggtgatgcacgacgagggtatcggttacggctctatcaatcatccggtagacacctgccataactgcggctacaaaggggtgattttcgacaaatgccccgtatgccagagtgaaagtattctccggatgcgccgcatcaccggctacctgacaggtgacttaagttcgtggaactccgctaaacgggcggaagaaaaagaccgcgtaaaacacttgtaaaaattgagagttgagaactttacttatattttcatatcctaatttacaatgacaactcttgactctcaactttcaactctccgcttgttaggaacttatccggaaacaatcgttgacggtgaagggatacggtattccatttatcttgccggatgttcccatcactgtcccggttgtcataacccggaaagttggaatccgaacgcaggtgaagaacttacggaagaaaagatacaatcgattatccgggaaatcaaagcgaatcctttactggatggagtcactttctccgggggggatcccttgttctacccggaagaatttctggcgcttgtcaaaagagtgaaagaggaaacaggaatgaatatatggtgttacacaggatatacgtatgaagaaatccgggaacaaccccgactgaatgcggttcttccttatataaacgtattggtagacggacgtttcgaacaggatcttttctctccttatctggaatttcgtggaagtagtaatcaacgaatcctaaaattatcagaccgttttcaaccataaaaacagacggttgccggcactaaagacaaagtctccccggcatcccggacagcaccaccggctgcactaaaaaaacttatttttttaagaaaacgaaaacacgtaaagcgctgttttgtttacttttacagaaaaaagaaaattctacaagaataagtttttatgatacaatcagtaaatcctgctccaacggacgaaaccgacggactaccaatgcccaaacgtatctgggcggtaatctccgtcggattcgctctttgtatgtcagtattggacgttaacattattaacatcgtactccccaccctttcgcacgatttcgggacttcacccgccgtgactacctggattatcaacggttaccagttggcaatcgttgtttctctgttgtctttttccgctttgggggagattatcggttatcgaaaagtatatctttcggggattgggttattctgtatcacttcactgatttgcgccctgtccgattcattctggacattgacgatcgcccgcatttttcaaggattcagcgcttcggctattacaagtgtgaacacggcgcagttacgatatatttatccgaaaagccagctcggacgcggaatgggaattaatgccatggtagtagcgatctctgccgccgcaggaccttccgtagccagcgggattctttccattgccagttggcactggctgttcgcgatcaacgtacccttgggaattacggcattagtgctgggtatgaagcatttaccgagacaagaagaacgcacgaaacgaaagttcgatacgatcagtgccatagccaatgctattactttcggattactgatttacacgctggacggattcgcacatcacgaaaaaatggattttcttttcatccaattaattgttctcgtggtggtgggtacttattacgtgcgccgtcaactcagccaagccactccgttactacccttggacctattacgtatccctattttccgactgtctatcctgacctccatttgttcgtttatcgcgcaaatgtcggcaatggtttctttaccctttttcctgcaaaacaccttgggacacagtgaagttatgacaggactcctgctaaccccgtggccgttggcgaccctcgtcactgctcctttggcgggatacctggtggaacggattcatccgggaatattaggaagcgtcggtatggtgctgtttgccgtggggcttttctccctgtccggcctgactgccgagtcctccgatatcagcttaatcctacggctgatgctatgtggtgcaggtttcgggctttttcagacaccgaacaacagtacaattatttcttctgctccgacgaaacgttcgggaggagcaagcggaatgctgggtatggcacgcctgttgggacagacatcgggaactacgctcgtcgcattacttttcagtttcgttattccaggtaaaagcacggcggtctgcctgatagtaggaagcatatttgcagtggtagcggcaatcgttagtagtttgagactttcgcaaccttctacattaaaaaacaattcataaattgaggccggcacgataggtgggctactactgaccttctaccggcctcgcagcaaaaaaatcaatattccgtttcacgaatcacctctaccagccggcagaaatcctccggatatacgtcaccgatgtttccgatacggaaagtgtcggcttttgagattttgcccggatagatgacgaaccctttgcttttcagtgccagatagaaagccttaaagtcaaaatccttatgcgggtaaaggaaagaagtgataatcggtgactgaatagcgtcgtcgagcaaagtttggaaaccgagagaacgcatcccttctactaatatacgatgattttcgcaataacgctggtaacgtgcttctacccctccttcttcgagaagttcggccaacgcctgtttgaaagcgcggactacatgagtaggagaagtgaagcgccattttccatgccctttttccatagtttcccattggtcgtagatgtccagagaaagagagcgggccacccccttgcaacgcatcaattccgaacggcgggcaatgataaacccgaatccgggtacgccttgaatacatttgttggaactgctgataagaaagtcaattcctaattcgtttacatccaacggaattcctccgaagctgctcatgcagtcaacaatcagtttcttgccatgcattttgacaatgtgggacaactctttgatagggttcaaaattcccgtagtcgtttcacaatgtacaaaagccacatgagtgacatcggaattattgctcaaatagtcgtctacatattccacagatacctgctctgtttcttcaaaagcaagcatatcataatcgaggtgataatattcggcaatattacccatgcggtctccgtaagcgccgttgctgcaaatcagaagtttgtctttcggagtgatagtggcgccaagtacagcttccacgcaataggtcccgcttccctgcaaaagtacagaagtataatctttaatattctttgtggcaatgctcaccagatctttgcgcaattcctgaacaatgccgaggttataatcttcgtcccatgtacaccagtcagtcatcatagtttcttttactgtttcagacgtggtcagaggaccgggagttaataataaatatggtttcataatgatacatttttttaccagcacagtgctggaataaagtttctttgcgatatattgttataaaaagtacagaagcggttaccgttccgcttatcatctgtcagcgttcattctttcgatcaatgcaggcagttcctccatggaaagaatcacataagaggcacctgcagcaaacatacgttccttcacttcagcgatgcgagcttcaagttcggcagccggcatggcctttgtttcggcctcggtgagagccatttcgttacttccgagaacaactcccacactgcaaacctttgcgttgactccctctttgatgtcggcaatcgtgtccccaacttttactacggcatcaagactgtcgacacccagctttatcaggttttcaaaaatcatgtaaggagccggacgtccggcgggaagtaagttcggagtagcacagtaatccacccgatacccttttgcctgcgcagcaggaagaacaacattcatcatttcgcgggtatatccggtagtagagccaattttcagaccttcggcacgcagtttctccagtgtcggaatcacgcccggaatagggtctgtgtaattttcgagcgaggcaaacagatgtttttcaaaaagacggttcaattccaccacatcttcctccgtccaggcacgctgataacgcgtagcaaactgttcattcacctcgggcatcgacagcaactcgcgaatatgctgaatctttggtaaccccattggtttgcgggtctgcaccacatctataatcagtcctttttcggcaaatgcttcgataaaagctgccaccggggcaaaacatccgtaatcgacggctgtaccggcccaatccataattacacatttaatctttttcattcttgtttcctatatataattaatttatttatgatttatcttttcaataagaagatgcaagggaaggaaccggacaagaagttgccttttcacgtatttccttccgcttgcctttccggtagcgctgcatcaggtagaacaaggaaactgtaaacgccgtacagcaaacgattcccaccgtgcccgccattgtattgtaaaattcgagccagtccagattcggattgaaacattctttaaataccaacaccaataccgttcccgtatagccgatagaatcaaccattgcgatgaagaaacccacatttcccctaatccggaaacaggctataaaacggtcgaagaaaattgtctgaaaactaagataggaaaagtagaggcaaaggctctgaataaacaaccacaccaacggagaaagttgcaagctatcgtaattgaaagcgacgaaactgagagttaccgcacctgcaatgaccagcgtcagcaaggtcgaaagaactttgatatgacttttcactaatgcaagagtggcaaaaacagccagaataatcaacgtcacaacaccgtctactttggcaaatacccaagaagaaagaccggcggcattcacatctataatcttcacaagaaagtcttccttgacatcttgcaggacagtgagaaagagattggcaaagaaaagtaacgtcagcacaggggcaaagttgcggaaaagttcccaacgttgttgtctgtccaacgtgacacgctccacacgcaacgctttatcttcggcagtcggcttgggtaggtggtcgagaatgtatcccagccccgccaacagaggcagcgctaccgcaccaatcaacgcaggcatccaaaactcgctgacattcaagatatcgactacgaaaaccccgatcgactttgccgtaccactactcaccgcaatactcagcccgaaagggaagcgagtaagtccgtcacccgccggccttcgaggaagctgaagataacgccccacatacaacccaacgatagcccgttgaagaacaacgccagcacattgaacggacgaggcagacatccgaaaagaactaaagagagctcggcaaccccaatggagacaagaatgaatttcaggcggccctctctcttcagttcagaaataagtttgattccgataaacttggataccatgtacccgaatatctgaatgatgcttgttgccactttataatccatgccgaacagttccatgccgtcgaatgtagcagcggtgaatggcttgcgaagcgcatacaccagtgagtaagacaacagcgccgcacctcccgcatagaagataaaaagtaaatcagaaagttttttttgagccgaaggcgacagtttttctttgaaattcatatagcgtcatttttttgtttccggtgcaaatgtaggacaccgggacgagtgaaaaaatgaatttcaatgaatcatatcgtatatttttcttttcggacagagtgaaatattaatgtaatattcatgcaacaaaatcataatacattagtcattcctttgcaacgaaattcaatttgcaacctcaagaatcatggatgaactgaccgatatttacaaaagaatagaatacctgcgcaacaatggcgtaaagatgaaagaaattgccgaccgtgtagatatggcaccaagcgtattgtccgccttatactccagcgtactgcctgcctacatcgacctgctgaaaacccgcacaccggacgaggcattggacgacgcactggcactagtgaacaatgtgtcgaaaaaacgcttattaaataatgtaagctcgatgagaatactgctgcaggaaatggaaccggaacaacagaatgaagcggacagcggtaactcattcatcaagctgctggaaaaggaaatgaaagaatccgtacaagatgttttcaattacagcggcacttatctcagttacagtctctcctcctctacggacagcctgaaaatcgaaccttacatgatttgcgcttccgaaaacagtgaatatgtgaaaatgggcatgataaacgcttataaatctgttcattggggaagcggaattatcagtaatcaccaaaactcatacctgatgttcaacgaacgggatctgccccagtttgctttggtcaccatttacctgcaactgccgcattacgaatttcccactatgctgaaagggttgtacctttgtctggactataaccacaaccccattgcccgacgcatcgtattagtgaaacagtcggacagcacggacatccggactttcttggaaatggagagcaaactggtcccgaaagcggaactgacaccggaactggaggcatattataattatacctgccgggaaggagattacatcaaaacgtgtactgttccctccccaaaactggacgaaactgacttggagcgggaaaagaaaatgttaacgatttaacagtcatgactgattacaaacggaagaaaaagaggaaacgccgtttcttgtatgcagaccagggcatttctgcatgcaagaacggcgttttaacacagtgttaaaacgccgttcttgcatcacaggaatcacgtattccatttcattgaatatcaacacaatgcagcatactcatgcgctaacatccacaccaaataccgatcatcccgttttaatgagattgccaatctgacaactaccgtgtcagagtagagtttagaagaaaaacctcaaaatatcattaaagtttgcccaaataagcagaccgaaaagtaaaatcataccggtcatctgggcatactccataaacttgtcactcggtttgcggcgggctatcatctcgtaaataaggaaaagaacatggccaccgtccaacgcagggataggcagaatattcatgaaagcaaggatgatagacaggaaagctgtcatgtaccagaactggtgccagtcccacgtagctgggaagatactgccgatcgttccgaaaccgcccaactgcttcgctccttctttagagaacaggtatttcatattgcccacatagcctttcagcgttttcacaccaagagagacgcctgcagggaaagactccaggaaggcatattgctttttcaccattggaagaaggcggtcggtgacaaggcaggcggttactcccattagataggcagaatcgacacgcatactcaatgtatccgtcacgccgccacgcacataagccaaggtgatgaagcgggggtctatgctgtctttaaggagagtcgcagcattctttttgcgctccgccatggcttgtttgaaatcggagaaagaaatcggagttccattcaaggcgataatactatcccccggctggataccggcttgcgcggcaggcgagttcaccattacactgtctacgacatacgggaaacggaaagaagcgaagcggatactgtccgccaacagacgttgcatcatatcatcgggaatataaacggaagcctttgcaccgtcacgcaacacactgacttcgcgtgcatcggcaatctggctcaacatatcaccgtcataacgttcgaaaggaacaccgtcggcagagagcaacacgtctccgtctttgaaacctacggacttggctgtttcattaaaatccataccgaggggagcttcctgtacttttatatattggtcgccccacgcgaaaagaatcattgagtagatgaacaacgccaacaggaaattgaacaacacaccgcccaccatgatcagcagacgttgccaggccggcttggaacggaactcccacggctgttcgggttgtttcatctgttcggtatccattgattcgtcaatcataccggctatcttgacatagccacccaacggcaaccacccgacagcatattctgtttcgcttttctttggtttgaacttgaacaaagtaaaccaagggtcgaagaataagcagaatttttccacccgcactttgaacaaacgggcaaataagaaatgcccgccttcatgaataatgacgagcaacgaaaggctcattatcaattgcagggcacgaatcaaaaatgtttccatgtttattatttacaaattactaattacaaattatttctgaggattttgccggcgcacaagctcggaagcgattcttcttgcttcttcgtcggtcgctacatagtcctcataactcggattcgccacgaaagcggcttgctccattgttttctctatcacatcactcatgccgagaaagctgatgccgtctttcaggaaagaggcgaccaccacctcgttggcggcattgacaatacaaggcatatttccgccccgatacatcgcttcgtaagccagagagaggttgcggaaacgcttcgtgtcgggttgttcgaaagtcaggttggtacattttgcaaagtcgagccgttcaaaagaagcgctgatacggtcgggataagagaacgcgtactgaatgggcaaacgcatatccggcataccgagctgcgccttcacggcaccgtcctcaaactggaccattgaatgaatgaccgactgcggatgtacgaccacttctatctggccgggctgaacgccaaacaaccacttggcttcaattacttcaaagcctttgttcatcatggaagcagaatcaatcgttatctttgcgcccatttcccaattaggatgtttcagggcttgtgtcttggtcacggttttcagttgttccaacgtatacgtgcgaaaaggaccgcccgaagctgtcagaatcactttttcaatcggattgcctacttctcccgctaaacactgaaagacggccgagtgttcagaatctaccggcaaaatcggggtgcggtattgctgtgccaactggtttatcaactcacccgccacgaccagcgtctctttattggcgagagcaatagccttgcgggcacggatagcgttcatggtcggtttcaacccggcatatccgaccatggcagtaagcaccatgtcaatcggtccggcttccacaatctggcaaatagcatcagtacctgcatacactttaataggcaggtcactcaatgcttccttcagttcggcatactttgcttcgttggcaatcacaacgacttccggctggaattttcttgcctgcgcaatcaacagttccacccggttgttggctgtcagggcataaggctcgtacaggtccgggtgttcttcaatcacctgcaatgcctgtgtgccgatagaaccggtagagcccagaatagctatttgtttcttctttttattattctctatactcatcattaaaatacaatgtatttctccggattaatgggatgtcccttataccaaagttcgaaatgcaggtgcggaccggtgctaagtgtgccgctattgcccaccaaagcaatggcttcgccgcctttcacacgttcgccctctttcttcagcagggaaccacaatgtttgtaaatcgaaatcaaatcctgattatgctgtacacctatcagatagcctgtttcagcggtataagtgcttagaatgaccgttccgtccatagtagccaacacactttcattgggattggcggctatatcggttccgaaatgtttcttttccgcattgaaatggtcggaaaccattccgcgtgtgggacgatataaaatcagtccgttcacatccggttgggaagtgaccgtggtaaggttatatttttcattctcttcgtactgacggcggaattcttcttcgcgtttcgtgcgttccattagtgtgtcttcacgggcggcggtcagcgagtcgagcgtctgcacgctgtctatcgccacttttccactgaaaatatcctgaatattcataatgtagaggttctgcttgttgagtatctgttgcagggagtctacccgtaaggcattgtccacaatctgcgtgcggacctcactgttcatatatcccggaagataattccgcaaaggggtgaaagcaatgatgcaggccgcaatcaggaaaagcaccgccagcacactaagcagcaccgaaaggccattcagttttgacacacgaagccctacaatttcttcaagtgtattctcattaacaaccgttagtttatacttgaacttgaaatttttccagaaagctctgcttcgtcttttcttcggcatttcgtttattctaaattataagcgattacgctttagtactttaactttattctgattacttattcttcctcctccagttcgtccaaattcaacaaaccttcgggaagttccactgtgatgagtttctgttgctggtctatcccccggataaattcttcctgcgcgggaacaagcaattcttccccttctctttcaacgataaaaagcgtgttaaccgtggcggtatccacatctaccacttctcccaacatcccgtggtgcacgtcttccatacggaaaccgacaaaaaattcccacgacaattctccttcaccggcttcttccgcatgcttcaccggaaagtaaacctcgacgttggtaaacatacgggcacgttcggccgtgtccaccccttcgagcttaaccaaagcggtggaatccgaacggaaacggtattcctccataaagaaaggaacgaaaatcccgtcgagcaggcataccagataatcacagtccacccggtcgaaaatatcgtccgtgaaggtaaactgcaactcgccgtgtatgccgtgcggcttgttgaatagtcctattttatatacttcttctttctttatcatattcgagtgattctggctccgatagcgttcaggcgtccttctatgttttgataaccacggtctatctgctcgatattactgatcgtactggttccttccgcactcatggcggctatcagcagggcgataccggcacggatatccggagaggtgaggcgtgcgccgcgcaacttgaacccatggttatgtccgataactacggcacgatgcgggtcgcaaagaatgatctgcgcacccatgtcgatcagtttgtccacaaagaacagacggctttcgaacatcttctgatgaataagcacgctccctttggcttgcgtggcaacgacaagcattacgctgagcaagtcgggagtcagtcccggccacggtgcgtcggctatcgtcatgatagagccgtcaatgaaagattctatctcgtagacctcctgtgcgggaacgtaaatatcgtctcccctctgctcgagcttaatgcccagacgacggaaactctcgggaataatgcccagattttcgtaggagacgtttttaatggttatttcgcttttggtcatcgctgccataccaataaagctaccgacttcaatcatatcgggcaatacggtgtgctgtgtgccgtgcagttcttccacgccttcaatcgtcagaaggttggaagctataccgctgatccgggcacccatgcggttcagcatccggcacagttgttgcaggtaaggctcgcaggcagcgttgtaaatagtggtagttcctttggctagtacggctgccattacaatgttcgccgttccggtgacggaggcttcgtccagcagcatataattgccttgcaacctgtcggcggtgatttcgtaaatgccgcgtccttcgtcataacggaagtccgcacccaagttctgaatgcccaaaaagtgagtatccagacggcgtcggccgattttatctccgcccggtttcgatattaacgcttttccgaaacgggcaaccattgggccgatcaacatcactgagccacggaggctggaacatttcttcagaaattcgtcgctttccaggtaagccagatcgacgttttctgctttaaagctatatgagtcaatgcctttctttgaaaccgtcacacccatttcccgcatcagctggatcaggttgttgacatccaagatgtcaggtatgttgtccaccgtcacttcttcggcagtcagcaacgtggcgcagattatctgcaaaacttcgtttttggcgccttgcggatgaatttccccgcttagccgatgtcctccttcgattacaaatgaagccattgattgaattttaattgtttacgattccaaaaaagagaattacctgtcctggttattctgacggtagtttctccgctggttattctgacgattgttggtatagttcgtcttcggacggtaattctggttgagacgttctgccattagacggacaatatcatcggtcatctggagctttccgtcggaaagttcgtacaggtcttcggcaattttcttatcgtccaccgtgtccttgttccacgccatgtagtctttcttcatatggttgcagatcaaagcaatcaagttgcgtttttcgtttccttcgggaaactcgatcgctttcttaatcagcacttccagtgtgtgtccgtagtgacggtaacgcatacgggtagtgttgtaagggatatgatccggacgggtgacgaggttatccttgcggatgatctcgtaaggatagtcaatatcgagttcaaaaccggacataatagcgaggtgatcccacaacttatgcttgaaatcgggtacatcacgcaggtggggaaacatattccccattatattgataatggtgttggcacaacgctgacgctctgcacgatcttgaatggtcaacgcataatctaccatgttctgaatactccgcccatattcgggaagcggcattcttttctgttgggtattgtattgcatctctttactggataaatctttaatggataatgtatatttattcataacggacacggcttataatagtttcttcggcatggaagctacgaattctttcaggtagaaaggttcgaaataagccacgtctttataatcttctgtcgccaccgctttctctgccaacgggaacatcatcttcgccaacgggtgaatgccgtcgatgaaatgtgcgttgggatgcgtgattttctcacggcatttggcggctccgtttccgaaaaagtaaaccgggtgctcattcagatattccagataggaattttcgtccacaatatctgcggcaatagcccgcttcacgttcagggcacggtcataaacggctgcatatacttccatgcggcgtgcgtcaatcatcgggcagagcaatgcgtcttccggcaaatcatggtgcaacaacacaggaacacttaaaacctccggtgtagggatagcgatcaacgggatattccgcccgtaacaaacaccttttgccattgacactcctatccgaagtccggtgtacgaacccggtccgcagcttaccgcaacggcgtccaacggtatggcatgactatcaatgaacgacaacgcttcatctacaaaaactcctaacgacacggcgtgtgaagggcctttcaagtcttctttcacaaaaatcgtctgtccgtcttgactggccgctaccgagcaaacagaggtagaggtttcaatattcagtatacacgacataaaaatcagcttattaaattgtcgcaaatttacatgatttgtcggaaactacctaatatttgcgtagatattctcagaaggggtataagagcacttctaatctatacaaagtatcatattcagtccaaaaggacggatttgaagcaccaaatgaaagaaccgattcaaagaatgaggtgatgacaaggcaagtctttatcaataaaattgtaaaactaatttcaatactcatcagttaaaaagtgagaggctgactaatagttatttgatagtacacataaaccaaaagcaggttaaattgccgacaggagtaaaagtatatcccgaacattgagacctcaaatccgcaactacgcgcctaatatgatacagaagcgaaaagaatctgcatcgttagtaaaaagggggcacagtgcatcgaatgtcaccataaagacatataaatgccccttaccccaccatgcgacttgaggcaatacgcaaaatcacgactataagttgtcggtgttatccaaagtcattctggaacacattggcataagcattgttgcatgaatagatattcagcacatacttccttgatgtcctgacccatttggctggcacagagatgaacttaaagacaaacgtcttgatgcggcttgttgctttgagtccgaacctcttcacgtcaagcctcgccatgatgaatttatagaagttgcgtatgagtgccataagcagaagaaacaccgtgttttctcccataaaggattttggaagcctgttccagccgaatccgttattcatatcatcgaagatgcgttccttccctccacggaggttatagaattcgacaatctctttctcggaagactcgtagtcatttgtaaggatgcagcggtaggtgtattctccttcccacaggtcgagttcgccgtctatccgcttctgtctttgaatcacaagacggtatgccttccctttccatttctcgatgagaatggaggccagctcaaactcaatgccgcccaattccactttcttccaacctctgagggcaaagatgtcattgtagagcgaactgcatcggttagcacggatatagaaggtcttgcagtgtttagcaatctcttccactatctcttcagaacacgagccgcaatcagctctgaaacggttgataataagcttgttttgttcaaacctttcaaagaacctcttcagcgtgtccttctggtggaaacggacatttgtgttgccgtcgctgttctcaatgccgacaatcaagttgccaataaccgccacgccagggcgataaccaaggaacttcttgtatgtaggcttcgcatcaaacttctcagcctctatgaactggtggtcgaagtcaacgtcatacccctcgccctctttcagctgccctgtggacaataggcaattgaggagcagtgtattcagcttgtctgccgtgttgaagtcgtaggtcttgccagtgtcggatgtgtaggaaatgttatcctgggtcagttcctttatggctctaagaatcgtgtcggcactgcatgtgcgaagtgtcggatgaagcgaaaggtggtacatcagatgagtggtgacatcctcgatgcatgagccgccacaaaaataaacgctcataagcgaacggatgatttcgctgtattgataaccatacagcctgcatctcataccgagggttgagtcgattacagatgagagtctggagtcaaattgctccattattgaaaatattcctccaaaaggagtgagtttctcggatttaattgctacctttgccatgtctgtcgggtttgatacatattttgatttgcaacactaagataggtgaaaaatctgacatggcaaattcctgagcaactttttgttgctcaggtacttaaaaagttatatttgtaatagtgttgcggaattaaggtgagataaaaaaaatgccgaagaaaaagaaatatctatcttttcttcggcataagtccaacaggtaaaagaatctttattcaagatcccttacgcaacgcacgtatccttttttgtcattgacaagcctgtctttatcgcctccccactgcgtgtccacagtcgtgacgaatctgagataaccatcaaaatacatctgatagccggcactaaatgatcttcctccgttcatatcccgtttagaaaatcctgtccgagaatggattacctgtccatctttcatattcaaagaagataaatttccaccaaagtcatagactttaggtttctcccggtcatcccagtcaaacaaactgccggtcattatcatcagttcagcctcattaggcaagcgccatgtccccaaatcactcttatccggtttctgataataataagcacacggagagtttcctttctctatatcgctcatcaaggtagtccaggtttcgtagtagtattcactgctcctgttaggattcttcaaatccttcggcttgtctatcgtattcgcaatatattgggcaacttcgaaccctttgtgataaatcgtattaatctgtgaagtctcattatgtgccggaagttcataaatagctcttgaggccctggtagtattagcaggtaaattgtcagccctgaaaatcagatactcatgctctgtccatttgttgaccagtgtcttgctgagttccttatctatttcatcaagatgataactatgatcctccgaggtttccaagattcccaaatccctgatcagtctcacatccgaaaaaggagttctttctccgggacttgccgttttctggtaatcaaaattatataaaggggtcatactatgcgattcttctacaaagataatggcattagggctgttcaatgtcaagttggtacttcccatgaaagctcttgaggtaaataatgctgtagcattatccgacggagcgtgcccaacaagcctgctctttaacggcaatacccgctctgctacatacaacatgtttgcttcacaaatagaaggaatataccattgcatttcatttgcctgcatctgtccgtcacggttgttgtccctgtttctcaggaacggggtgaagcaggcgtatgtagcatgataatacttcatagccaggttggtgtgatctttacttagtgtcaacttcgcattattgacttttgtcataacttgccataaagttttctcttttcctctcaacatcggatcaggcattatattatcggtttcatctaatcctcctgtacgtctgctcatcaaagaccatgtgtttgcccaaccattggaatagtatttattataaaaagcatccgcttcactgggacctcttacagaccaatccaaatcaggggtttcattcacattctccactccccaaacgcgcataccgtcaggactgttgacaaacaccgtttttatggacatttgccgaatggttacaatagcttgatgataacgtgactgtccgtcaggagaaatttcatgcgacgtgttcaccagcaaatcaaacgtacgatccggggagttggcaaaggttttccacaaatttttatccttgggagcgttctcctgcataggattttgttcgtagaaatattcattggcataaacagttactttacaaagtcccgaagccgcattgaatacataatcaggttcattcatcagcctgtaaagaaactgctccagcgaaagcagattagcacccgtatcggagaaatattgcatatcctcgtttccattgtcggccagagtgcttggatggatatagaatttgagccagttcgtatcagcttttttttctttagaaggaatataattgttattcttcaactgttccaattccgctttcgtataagagataatcttatcacagaacggtgtgcgtatggcaaaagaaatcatggcatcatctttcagagtaccgtccggattgaagatagcaagttcatctttcttaaaacgcatcagtccctgttcataatgacagtcaaaattgaatgaccggtgtgcgtcatacaccagcccctctactccgggagcgggttcctcctctttcgccttgtccgattttgcttctacaaccagatcattcatgcctttaatggtcacattataggtataatgtacgttacgttctatatcataatcattggccggatcgttttccgccgtatatcccagataaatgcggtaggtcacccttccgaaacgctcggtaggagtatcaccggttgcaagattctgacgtaactcacctgtaaattcaatatagggagccagatccggggcatattccgtctcaccgttttgcagattaggtttgtcagttgcacctgcaacgggagacttcagttgcttctgtctcagatcatatcccttcctttccgcattataaccaggggaagccggagaaatagccttcttcgcgatctttcggttttcgggcatgtagaatgaagtggtaatattgtcggcatcaccctcgaactggaaatattccgaaacccagtatgattttttgtccaccccgtcagcatcccatgaagcagtctgatcggttccttttgcatgttccgcaatgaaggtcgatcccggcacattaccaagacgatatgttccaggctcaaaagtgagtccggcaattgtttgcaggttcaatgtaattttggcttccgagcgtttcaaggagacttcgatttgttttgtagcggtagaaaccgttactgtttgggttagcgacatcaataagttaccattcggacgaaacagggtatgaacagtcatggccgctcttactttttccaggtctgaatattttgaaatcccgtttaatacttcaggctccacatgaaacaacccgtcagcatccgatttatagttcgccagaagaaacagtgtctttttccctgtggtaagactgatatttttcaacaatcccatgctggtgggcgcatctgcatccacttcacctgtggatgttgtaagatcagttgcagcctgaataaggtcggctcttgaatactcacgtgagcattccacgttaccggaagaattgaaaacccacagataaaggttatagatttttctctcttcactttccagtaaggcggaacgtgtcttggccgtattagctgccgtaccgacacttatatccaccgtcgtgggaactccctccgtgacaccgctcccttgaaagatttcttcatccgtacaggatgcaaagaggggtagtaacagcagaataaaataagttattttcagcttgtatcgtttcataaataataaaaattatcgtaataaattctcgtatacatcattggaatggaggaaggtctacctctttactattccaaggctcaacccggtaaataatctctttatctgaagattccggcaggactatgaatactttataatcccgattcggataaataggaccggaatatactccgggagaagtctcctcaccaacatcaagcaggaaagtcctcgtttttgtttgtgattcatctcctcctgtaaaataatccaatgtcaactgtattttcgggtgattttgctttttctgccaggaattactttccggaatataaggggccagatactggggcacaacaaactgttcgtataatcgagcttccattgccacataatcaatttctccctcggcagtaaggggagcctcgtatacagtcaatgatgctccttcatgttttaccccataagaatatgtacctgtatgttccatagcctttcctgttcctggggtggaggcagccaactgagttttctcggaatcattttccctgaaagagggagacatcaatacaggaaagttcaaaaaggaaatcccttggtaattatacgtaacctgaccgtaacggggtgcgcttgccagatatactctgatacgggcaaaatcacggaataggggaactgttatctcttgcgccagctttcctgatgcaggcagaacagatgccaccgttttccccgaaagcaaactcaaatgtagtctgttagacacgccgggcaaatctgcccaagcgacaacataagttcctttccagtcaataatcttttcatctgctggagaaggagttacaccgtcataaggattattcacaggtaatcccaaacttccatcctgctgttccttaataatagcaggaaaagcagcacctgcaaattcctctttggagatttcctccgtaccagctcccaggaagtcccatggaatcttattctgaagattgccttcaggagtataataaggtagatcctttcctgtctggttaggagcatacaatgcataaaactcggtttcccccttaggaatacgtatattgatctgatattgtccgtccaccccggttgaattgaagggaagcagttgattatacacataccgattcaaatctctgttaaagatcataagtgctatccttggctgggcgggagcctgaggaaacagagtaccggtcttaaaccactgaaaaggatcagaggaaagttcatccaacaaatcgctgtcaccggtttcaacacctctggttgtaagatttagtctgacagtcacagcatcctcatcgaaaaactgttccgaaacagtatcttcatttcggcaggataccgaaataaagcaaaggaccagtgacatcgttatcatagagtacctcacagccttcatcatacgaatatatttaatatttttcaacataacattaatcaatcagttataggaaccacatcaacagcttcccatggttttacacttatactcagtgagaggggattctggcggaaaaacagtggaagaaccgcttcttgccgtcccgttatccgtatctgctcgggatattgtgcgatatattgtgccacatttacagtacaaagaaccttgtcaccctgcataagacggatcattagcgggtccttgtcatcaaagcgcagggtattgaagtcaagcacgaagcgatcattctcctcgcctgcgataaacggaaggtcaaaagaagtttcaccagcccgctgtccggaaagatagaaacgtgcagaaagtgattccattgtcaggcgaaaacctgcctccttgttctgctcaaaccaggtctgcgaattgttatcatcatcagaaaggactaccgcatggattttcacatgctgggaataaaggcgaactacgtcacgggactcgttcataactttagatgtaatagctgtttctcccaggtataacctgtcaaacgtaccggatgctcgtccgtccttttccattagttcggggcgggaaaccgacgaacctttgtagctgtcctctttaccgataatcgtttctgtcaaagcgttgcctacggccaccactttataatccccttccggaagcgtgacctccagtggtgaaagcagccgttctctctccagatgatgcttttctataagaacttcgcctttggcatcaaaaataaagacatcaataccatccacatattcctgtaaatgttcctgattgtcatcagccagataagaaaagacaatcgtgttgccaagacagccgctcaaatcgtcatatacccgatcacaggcggtcacgaggtataaagtgagtagcagccccagccaagtgggtatgtatcttatgttcatactttatactaattattataaatcaatgcagataacttccccggaagagataacgtatacttctcccgggaataataaaaaagggaggagataacctttcccctccccaaaagtcaggcggattccggtattgacctgtcagagccaacacgggagaaccgctccggcaagtgactattactctcctatctgttaaaggatagggaagacgttcacagcagtccaagcttgtacttgaacacgaacaataacattcacattttcatcttccaagtcttcctgaccacccggttctggagtcactccttccggaatagtcggatctgtatccaccaggataccctgtccgttgttcaatgtgctaagattcagattgatcaggtaaccacccttaccggccggaacatcagtcgtaccgtctgttgcaccttctgtcttcgcataaccggatataactacaaaacgtctgtctacagatacgcccgcatcacctgttttgaaaacgaaagcgagttttggagcattgttagtctttccgtaaccggtaattccatttgagaagaagttaaatgccgcagcttttttacctgctccgaaatcaaaagcagttgctgtaaagtaggaagatacatcggacaagtctgtcttgccatcaggtttgaatgttccattggtaaaatcatatctgtcacctgcataagtcttggcccagaaccagtttgcttcttcttctactgtaagtgcaggaatagaaagtgttctgctgaaacggttcatcaggataccctggtttgcagaggtcacgtcaacaacctgcaaccatttgctcaaagcggctttcttgctaaggtcagacttaccatcccacacttcgttattgaagccatcggcagcagctttgaaagccgtccatgcatcagcactggtttttccgttgttttcagccttacccagccatgtcttgcaccactgttccgcctcggccttttttccgtctttccaagtaactttgataaatttggttccagtcacttagaaacggttcatactggcagccaaggtgagttccgctttcttgacggtacgcttatcctgctggggatcaacgccataagattcggcaccaacagtggtaagttctttggaacctgcatagatcacttcattaattttagccttcaacagttgtttgctaacatcagacacgggcttgttctcaaccaatgcaccttgagggtttgcaataacaagagcttttgttgcgcctttgtccacgttaaggaatttataacctcctgtcgcttcaccagctcccacggcggtagatgaagtcaacttagtaaaatcatcagaccccttcgtaaactccttcgcaaagacaatatcatctccctttaacaagtacacatgcagtttttcaaccgttgccggatcaccattgttggcagtgttctgcaaatcgcccatggcggcacgtgtaccgggaccgggcaatgctactgacatcatcacatcaaccggctgattagcaccctccggtacaaccagattttcttcattgttacatgcagcaaacaacgccagcgaagccactgcaaaatacttcattactttcatgatttgaattgttttaaattgaaattactaatacaatatataactgagttacatccgcaacccacgatttattcatttacccttacagccttgaatgctttcgcacggttacatccccgagccgctgcctcttccaacagtttctctgccttcctccaatcacctttcatatcataggcaattgccattgggaacaggacacgactgtcttctcttaccacttccaatacctgcaacgcaccgtccgcatccttgccatatttcaacaaggcattggcataattcaaaaccgccacaatgtcccccggaaactgctcgtatgccttcttatataccggcagaggattctccccccgggaagcatacaatccggccagctggtacatttcgtacaagctaagacattcgggcttggtctcaaaaactccggggagttcctccgacgtataaggccttacatcaaagctgagactgaatgttgtacgccgcagagccgggtaaaactcttccaaaagaatatggtaagtcttatcattatctaactcacggatagccgactcacgttccgtatcatttgagttatgttcaatgataaaaaggattttgtccttattggaaagagtggaaccactgactgctgccttaagaccttcccagtcttccccaaccccttcggtacgataaaccggtgctttcttgagggcgggatattgactggaaatataatttgaaagggtttgagtccgtctttgcgcaagggatttgttataattaaaatctccttcgggagaagcgtaaccttttatatacacatcctttagctccgcccctttaatcaataggttttcagatacaaattggccgagtccggcaagctcctgacggttatccgcaaaggtcttgcgaagatcgtgttgtgccacgggaaaagtcactttacaatcaaaagaatccttgtagcacttgaccagcaccttttccggttcgataaaatcgtaggcataatctttcgctccaaagagtggaataccggcttgcaatgcaataccatcgtttttactcataccacattcggcacaaccatataacttttcattcacaacaagatgaccatctgccatccaactttcaaaagggaaactgcttttgaatgtcaagggtgtttctttcagctccttgacggaatgcacctcaccgtagccaagctggtcactcttcacattatgcagggtcttgcgacgtttaacaaccttatacctccttcggccggaaatgcatacaggttccagttccacacttttttttccatccactgaaacaaaacggggagaaatatacatcatttgctggcttttcaacttttcgacaagccctatcgaaaattctatatccaatttatccccgtccgcgcttctctctacacggcttccggaataatccccgtgcagaccattagctgacgataaagtttcctgggcaaaaaccaacatgggaaacattcccaggcagcccataataaaaatttgtttcttataatattgtaacggtttcatgatatacttttttgcataaaaaataaaaaatccgggtacgtaagaagactatttcaacatataaataatggaaatcgccgctctggtgggaccgatataatcagcatcccccttcccctccttttttccgcaggtagtacacttgtacttatcataacgggtatgtacataaccgatgcccaaggaggcctctatattgaaacgattggaaacgacccactgatagccggcactcagaccaccaccccaaaaatatccttcataacggtgctccttcattttcccgtctcccttttgaagaacaaaaggtacatcaatgccaccgatgttcatctgccctccatgcgcgtgcaacccgaagaaccagccattgaaaacatcacacgtccagtaacgtagctcaggctgtaccaaccaatgactagccttctttgttttataccgggaggaggtagcatcctgcgtgtagaaaaagaaattcatccccacttgggtgtcaagcgtccatttccgtcccattgaaaactcaagggaaagattcggagtcttcagggcatcatacgccaaattattttttattgccaccttctgtgcaaaagaatgggtgcaaaaaaataaaaagaaaagaaaaatagtcctcttcatactaaagatttttatcattattattaatactctgtttctcgtttttttgatgttgcaaaagtactgcgctgctatcgcattggcattatacaaaaaagacagaaattaacaaatacatgactattttagaaaaaatgtcattattgtgtaaatgtatcatactcacagaacccaatgtgaagtcaaaaagccggtcaatcaaatgtaaagcaatgcaaaatatctattctatataagaatataacgaaacagataacaagtatctttactcgtcaaaatatctttatcttttaagattagatataaatcttcacaggaccgcttgcctacaccatgtaatttgcccaatgcgtcaaaaccatttttcttgataaaccgcaacaggtcctccaacagatagatattatacctcctaaggttccgtaagattctcggttgtatctccaaatattccaaaggagtagaaagtttatccacacattccgcaggtatatcatattctttgagtggaacaaagactttaaattgtccgcaaacaacattgttcctgtgtaaaacagccttatagtttctataccggagatggactgattgaagcctttgctgttcttgaaccagactttcccaacaacgacttacttcccttacgccttcctcatacatgaaaattaattctcgtatggaaagattatacctgtaggacagatcggatatatcagtccctgtcatcagggaataaaaaatatcctgcctcttttcatcccttacatacatggacatcattttgacaagatccttataaagacggaaacaatataccgacaagccatgtgcacgaagagaaataaaagtcttttccttcttgcttactttttgaatagaagattccatattgcttaatattgtattaaaaaagacaggtatttatcatacggtcaaattttatcttttttgctttcgctccgcaattctgtcggagttagcccaaacagtcttttacaatagcaggtgagatgggcgggagaactaaatccaaattccatggctatttcccggaaagcaacatccggatcacagactttctcacgaacaatctcagccttccgttcctgcatccattgataggggctctggttaaaacaatcttggaacttgcggttgaaagagcgttctgacacacaacacaaactggcaaattctttcacagatttcactttccgataattttccagcacaaaatcttcaaattttcttcctactccggatgttcctgaaaagaaggaagcaagctcgggcttggtataaaatcccctcaatacaagtattatttcctgttgtttgagaatgtgcatatgcctacataataatcctgcatccagataaataagcaactgccttaacacgtgaagcagcggtttgcgaattagaagaatacagttatccctctctcccaacttgtcacgggaaatagaatcaaaatacattttgtcacaagccgttatctgtttgttccaaaacaataaaagacattctgccggtacaacacttttaatccggttctcctcccgctgtggaataaggagcatcctgtttctgagaagagaaatatgatgttcctgccctatatcaactaacaattctcctttcaacaggaataaaatacaaaaacagctgtcattatcaacttgcccacattcttgtgcagccaatttatatcgagtaaacccacttgcaaaattaagctgataattaaagcaggagcggtgctcagacaaattaagtagtttcatgttatatcttaaaataattatgtttagaaaacatcgtaatcaagatgtttgtttttaacaaaaaagacatatattttcagatatcagacaattaaaacatgcttataatttcacgcctgtttccctgatttttctgcaatcaaagttttttattgcagctatttttagatgtatcattgaaaatagttatatttgcgactagtttattaggacagatatgagccagcattaaaatcggcatataagtttctgataatcagatataaatataaaattacatgattatttccaattcttaaaatattcgtgtagttttgcgcaaaactttaaaaatatgatacagtcaatgacaggttacggcaaagctactgccgaacttccagaaaagaaaataaacgtagaaatcaagtcgctcaacagcaaggcaatggatttatccactcgcatcgccccggcttatcgtgaaaaagaaatagaaatccgtaacgagatttccaaggttctggagcgcggaaaagtagatttcagcctgtggatcgagaaaaaagagggcgccgagagtgcaacacctatcaaccaggcattggtggaaggatattacaaacagattcaggctatctcggaaaacatcggcattcctgtccctacggattggtttcaaacgttgctccgtatgccggacgtgatgacgaaaacggaaatccaggaattatcggaagaggaatggaaagtagtgcacgccacggtgcttgaagcgattaatcatctggtagatttccgcaaacaggaaggtgccgcactggaaaagaagttccgcgaaaagattgcgaatatctcgctgttgctcgaaaagatcgctccttatgagaaagaacgggtagaaaaggtgaaagaacgcatcacggacgcactcgaaaagacgttgagcgtagattatgacaagaaccgtctggaacaggaattgatttattatatcgaaaaattggatgtaaacgaagaaaaacaacgccttggcaatcatctgaagtattttattagtactatggaaagcggtaacggacaggggaaaaagctcggatttatcgcacaggaaatgggccgggaaatcaacacattaggtagcaagtccaatcatgcggaaatgcagaagattgttgtccagatgaaggatgaactggaacagatcaaggaacaggtactgaatgtaatgtaatttcaaatagaaagaatcacatgacaggtaaattaattattttctccgccccgtcaggctcgggcaaatctactatcatcaactatctactgacacagcatttgaatcttgcgttttctatttccgcaacaagccgcccgccgcgcggaacggagcaacacggggttgagtatttctttctcactccggaggagtttcgttgccgtatcgagaacaatgagtttctggagtacgaggaggtgtataaagaccgttactacggcacactgaaagaacaggtggaaaaacagttaaaagaaggtcagaatgtggtgtttgatgtagatgtagtaggcggatgcaacatcaagaagttttacggtgaccgtgcattgtcggtatttatccaaccgccttcggtagatgaactgcgctgccgactggaaggtcgcggcacagatgcgccggaagtaatcgaaagccgcatcgccaaagcggaatatgagttgagctttgctccgcagttcgattgcgtgatcgttaatgacgatctggagacggctaaggcggaagctttgaaagtaattaaaaagtttttggaggcctagttaattgtcttttgccagacagaaagatacaaatgaagaaacataaaaccggaatctttagcggctcattcaacccgattcatatcggacatcttgccttggccaattatctttgcgaatacgaagggttggacgaaatctggtttatggtcagcccacagaatcccttaaaaacgcagtccgaattatggagtgacgggctgcgtcttaaattggtggagttatctatcaacggttatccgcattttcaagcttcggatttcgagtttcacctgccacgtccctcttacagcgtgcatacattggaaaagctacgcgctgcttatcccgaacgggacttctatttcattatcggctctgacaactgggcgcgtttcgaccgttggtatcagtcggagcgtatcctaaaagagaacaacattctgatttatccccgccccaactaccccgtaaaagaagatgaattgccggaaactgtacgcctcgtccattcacctgtattcgagatcagttctacatttattcgcaaagcactggacacaggaaaagatatacggtattttctgcatccggcagcttgggaatatataaaaacaaatttacaatactactccgccaaccgatgaagcgttatcattaccacttctgccggtgcaccaatgcgaatcgggagttgtgaagtgccgattccgtttgttataataaggggaatttttgcggtgttgtaggccagcccggttaagaagcggtttccgtaatgagaatttaacaccggggcgactccaaagacacggacttgtccgccgtgggtatgcccggccagagcaaggtcggtgttagccactgaaacatcttcgatatagtccggtgtatgtactaataatatgacaaaatctttgggagagagtgccaatgtaggcgacacgccgttgtgtgtcaagtcgaaaggattgcgtacgcctgcgataatgatctgctggccgtctttccgaagagtatctacctcatgttccaacaccctcatcccataatgtttcattgtacggacaatttcgtcgtgacagcgttcgtaatcattgtttcccattacgccgtatgtccccatgggcgttttcacacgggaaagggcagcgaacaaaggttccacatattcgcaaccttcctgatagtcacctcccattagcaggacatcggccttttgggcaatcaacagacggacaaggttgttcagtccttgttctttcaacaggcttttataatgcaaatcggagacgaaggcaatgcggaaaccttcaaaagcttcgggaacatcccggtgagtgaaatcatatttcacgacacggtcgacacctgcataagcggatgacacactttcggttgatgaagtgattttggcttcacgaagtacacgatcagcagattcggttccggcaatggtttgtttctttgccggttcacttttcttttctttcgagacatccagctctttgagtccggcatgatccggcgcaaaaacatctgccgggacagtggaagcggtatccgcatgaacggaatctgtatttaaaacaggcgaaggcaaagtggacaccatatttttcttcgacttacaagaggccagcgaaagcagtgtcaacaagataacggaataaattattttcttcattttctcttaatttgaagtattttgaagtatttcgggggtgcaaagatacgaaaaatcatctatctttgtccgtcaaaactctctataatatattaaagcatgaaagaaataaagcgtaactcactgcaagcatggatattagcggcacgccccaagactctgacaggtgcagttactcccgttttaataggtactgcacttgccgccatggacgggcattttgaatggttacctgcactaatctgttgcgtgttcgccagcctgatgcagattgccgccaactttatcaatgacctttttgacttcctcaaagggacggacagggaagaccgcctggggcctgaacgcgcctgtgcgcaaggttggatttctcttcaggcaatgaaaacgggaatcatcgtcacggttgcccttgcctgcctcatcggttgcacgctgcttttctatgcggggtgggagctgattatcgtcggcgttctctgtgtactttttgcttttctctatacaaccggaccttatcccctatcctacaacggttggggagatgttttagtaatcatttttttcggttttgtccccgtaggtggaacctactatgtgcaagcgctaacatggacgccggatgttaccgtagcctcactcgtttgcggactactcattgacactttacttgttgtcaataattaccgcgaccgcgaagcggatgcacgaagcggaaaacaaaccattatcgtccgtttcggtgagaagttcggacgctatttttacctggcactgggaataacagcgtccttgctctgtctccggttcttgagtgaaggacatttttatgcgggactgcttccgcaactttatctgatcccccacttcttcacatggaaaaaaatggtacgtatatataatggtaaaaaactaaacaacatattaggcgaaacgtcgcgtaatatgctgctcatgggagtccttttgtcgttagggctattattaggttgaaagttgaaagtgaaaattaccgggttagcattattaacaagacaagacattaacagttatacgttattaacgacttattatacgttattagtgacttattacacgttattagtgacttattacacgttattagtgacttattatttagcgacacacgtgttttcttatgggttctttgtcaaatttgacgacaagataaattagggaaaaataattcaacagttcatagtcgatagtatccaatactctcctccttcgggaaggaggagtccccgtagggggaggtggtaggtgagtacataagtctattattaaaacaaataggcgcacctaccaccccggctttcagccacccctccttcccggaaggaggggaatggagttaccaccgacttgttaaatgcacattataattatatctaaagaaaaaccttcttttttctaacgttctttttctatctcctattatcaatcctctattatcttattttctcctactatcttatcttcctctattatcaatctcctactatcttatcttcccctattatcaatctcctactatcttatcttcctctattatcaatctcctactatcttatcttcctctattatcaatctcttactatctcatcttcccctattatcaatctcctactgtcttatcttcctctattatcaatctcctactatctcatcttcccctattatcaatctcctactatcttatcttcccctattatcaatctcctactatcttatcttcctatttcccgtacattttttcgtaatagccttgataatctccgctagttacttcttccacccacggctggttattcaagtaccattcgatagtcttcacaatgccgacttcgaatttcgtttcgggataccaacctaaggcattggtaattttggtcgggtcgattgcgtaacgctggtcgtgtccgaggcggtctttgacaaaagtaatcaaatcctcgttaatccagtcgattgagatttctccgttttcacctttcactttctttttaagcatttggcgatattcgggatgttccgtcatcaagcggtgaatggtcgaaatagtcagtttcacaatttcgaggtttgtcttttcgttgtgtccacctacgttgtagacctctccctctttgccttcgcgcacaacgaggtcaatcgccttgcaatgatcttccacatacaaccagtcacgcacgttacttccgtcgccgtagacaggcagatgtttaccttcaaggatattcttgataatcaatggaatcagtttttccgggaaatgatacgggccgtagttatttgagcaacgggtaatcgtaaccggcattttataagtgtcgtgataggccataacgaccatatccgcgctagtcttggaagcgctgtacgggctatgcggacaaagcggcgtagcctccgtgaaaaacccttcagcacccagagagccatacacttcgtcggtagaaacctgatgatagcgcacacctttcctccaagtcgggtagccctgttcgtccttgcccattacccacgcgcggcgtgcacagtccaacaagttctgcgtgccgagaatattagtaatcaagaacaactgcgggttttcaatgctacggtccacatggctttcggcagcgaaattcaccacgtaatcgaagcgatactcagcaaacagaccgtctactacttcgcggctacaaatatctcccttgataaaaaagcagcgttcattgtcgatatccttggcaatggttcccaaatttcctgcatacgtcaaagcatccagaatcacgaccttcacgtcgctatgttttgccagaatatacttaatgtagtttgcgccgataaatcctgcggcaccggtcaccagataagttttcatatatttcttattatgttgattttaggattgttttgccagttcaataaggtatttgccgtattccgtcttttcgagttgccggccgagcagaagcagctgttccgtcggaatccagccctgacgccatgcgatttcttcgatgcaactgacataaaaaccttgacggttctgaatggtggcaacaaagttggaggcttccagcaaactgtcacagttaccggtatcgagccatgcaaatccacgtccgaaaagttccactttcagcgtgtcttcttccagatagaggcgatttaagtccgttatttcatattctccacgggcggaaggacggagggcggcagccttttccgtcacagtagcgtcatagaaatacaatccgggaacggcataattgcttttcggaacggcaggtttctcttccagggaaacgactttgcccgtctcgtcaaattccaccacaccgtaagcgcggggatctttcacgtaataaccgaatatgcaagctcctttctccacactggcagcacggcggagcatggcggaaaatccctggccgtagaacatattatcgcccaaaatcagacatcccggttcaccgttcaggaaatcggctcccaatacgaaagcctgtgccagaccgttgggttgctcctgcacctgataagagaaggacattcccagttcttcacctgttcccagcagatcgcggaacatcggcaagtcacgtggagtagagataaccaatacttcgcgtattcccgccaacatcagtgtagacaacggataataaatcatcggcttgtcgtacacaggcatgatctgtttagaaatcgccttagatagcggatagaggcgggtagcacttccaccggccagaataattcctttcatgttcgtctttgttattcattcactggctgcaaaggtcggaaagaaatccgaaatgacaaaaataatgcgaagttatttatccgccagctcgataacttccaaatccttgaacgctccttcgtcaatgacaaaccgcaccaatgtacgtactttatgaaatccggacattcccgccgctcccgggttgatgtgcagcatatccaacgttttgtcatatttcacctttaatatatgagagtgcccgctgataaagagtttcggcggccgcgtcatcaggcttccgacaatggaaggatcgtactttcccggatagcctccgatgtgttttatgagtacttccgcaccgtccaccgtaaaacggttcacctgcggaaacaacttccggatttcctgcccatcaatattcccgtagactgcccgtaacggccggaaagccgccaatttttccgctacttccaacgaaccgatatcgcccgcgtgccagatttcatcgcacggttcaaaatattccaggtatttctcgtcccagtaagcgtgagtatctgataataatcctattcttgtcataattttctttgtttaatcccgcaaagatactatatttggaaaaatcttaaagtacatggaaagcaaatataattatttcaagcgagatatcagttggctctcattcaattaccgcgtattgttggaggcaacggatgaacatttgccgctctacgagcggattaacttcatctcaatctactcttccaatctggaggagttttacaaaatccgggtggccgaccataaagcagtggcttccggagcaacggaaagcgatgaagaaaccgtacaatctgcccgtgaactggtagaggaaatcaaccgggaagtcacccggcagctggacgaccgtgtgcacatctacgaacagaaaatactccccgccctacgtagaaaccatatcattttctatcaggacagacacgtggagccgttccaccaacaatttatcaaagattttttccgggaagaaatcttcccttacctgcaacccgtaccggtatcgaaggacaaaatcgtctctttcctccgggacaaccgcctctatctggccatacgagtttatccgaaaaaagagaatgagacagagcaacggcagcagccgtattacttcgtcatgaaacagccttatgccaaagtgccccgtttcatcgaacttcccgcacatgagaaagaccattatctgatgttcaccgaagacatcatcaaggcgaacttaaacctgatcttccccggctacgacgtcgactccagctactgcatcaagatctcccgcgacgctgacatcctgattgacgacaccgccagcagcgccgaccttgtagcccaactgaagaaaaaagtaaagaaacgcaagatcggcgacgtctgccgcttcgtctacgaccgtgccatgccgcaagacttcctcgattttctggtggacgccttccgcatccagcgtgacgagcttgtccccggcgacaagcatctgaatctggaagacctgcgtcacctccccaacccgaacaagtcgctccacagccttgagaagccaaagccgatgaagctaaccgtcctcgacgagaaagaatccattttcaactacgtcgcccggaaggacctgctcttatattatccgtatcattccttcgaacacttcatccatttcctttatgaagccgttcataacccggaaacgcgggaaatcatggtcacacaataccgcgtggcagaaaactccgccgttatcaacaccctgatagccgccgcccaaaacggcaagaaagtaaccgtattcgttgagctgaaagcccgcttcgatgaagagaacaaccttgccaccgccgaaatgatgcaagccgccggcataaagataatatatagtatcccgggactgaaagtgcatgccaaggtagccctcgtccgccgtcgcggacagaacggcgagaagctccccagctacgcttatatcagcaccggcaatttcaacgagaagactgccaccctctacgccgactgcggcctgttcacctgccgcaaggaaatcgtgaacgacctatacaacctcttccgcaccctgcaaggtaaagaagaccccaaattcacgactctccttgtcgcccgcttcaacctcatccccgaactgaaccgcctcatcgaccgtgaaatagaacttgccgaccaaggcaagggtggacgtatcatcctcaagatgaacgccctccaagaccctgcaatgattaaccgcctctataacgcctccgaacacggcgttcagatcgacctcatcgtccgtggcatctgctgtctcatccccgggcagtcatacagtcgtaacatccgtgtcacccgtattgtcgacagttttctggaacacgcccgcatctggtacttcggcaacaaccaccacccgaaagtattcatgggttcccccgactggatgcgccgcaacctctaccggcgtatcgaagcggtcaccccgatactcgaccccgacctgcgtgccagcctgatagaaatgctgaacatccaactggccgacaaccaaaaagcctgctgggtagacgcccaactgcaaaacgtattcaagaaaagaacgcccggtaccccaagcgtccgcgcacaatataatttttacgagcaactaaaaaacagcctgctctcacataatcccacataactctatataaccctatataactataacacatataacgccccatgccgcacccacccgcatggtttccccggactacttttttatccgtcaagcgagcttccgtaacggagcggatttttcttcaagtttggtggtaatttagccagtcggtggtatctccattcccctccttcgggaaggaggagtccccgtagggggaggtggtaggtgaatgcgtaagtcagttattatcagcattgtgtatccacctaccaccccggctttcagccacccctccttcccgaaggaggggaatggagataccaccgactataaactgtcaagtcattattttaccaattcaccttataatcaaattttttctttgtttctttgtttctttgtctctttcttttgtttcaagacaaaagaaagaaagttgtaacacaaatgtaacaagtatgacatccccctgcaacctcaaactccgtcctttgcaggcggaaataacatacacacatttatggagacaatttatttatgcattatcattttcctcttcgtactagccatattcgacctgatcgtcggtgtgagtaacgatgcggttaacttcctcaattcggcggtaggtgccaaggcggcctccttcaagaccatcctgtttattgcaggcatcggcatattcatcggagcatcgctctctaacggcatgatggacattgcccggcacggcatctaccaacccgagcacttctactttgcagaaatcatgtgtatcctgcttgccgtcatgctcaccgacgttgtcctgctggacgtattcaattcaatgggaatgcctacctccaccaccgtatccctcgtcttcgagctgctgggaggaaccttcgccctctccctcatcaaagtccgtaacagcgacaccctcgggttgggcgacctgataaacaccgacaaagccctttccgtcatcatggcgatattcgtatccgtggcaatcgccttctttttcggtatgctcgtccaatggctggcccgtgtcatcttcacgttcaactacacgaaaaagatgaaatacagcattgcactgttcggaggcgtggccgccacctccataatctatttcatgctcatcaaaggactgaaagacagttccttcatgacccccgaaaacaagcaatggatacaggacaacacttggatgcttatcagtgtgttcttcgtattcttcaccatactaatgcagatccttcactggctgaaaatcaatgtcttcaaagtagtagtactcatgggtactttcgccctcgccctcgcctttgccggcaatgaccttgtgaacttcatcggcgttcccctcgcaggtttctcgtccttcatggatttcacggccaacggcaacggcaatccggacggatttctgatgacctcactgctcggccccgccaaaactccgtggtacttcctcatcggcgccggcgctatcatggtctacgccctttgcacctccaagaaggcacacgcggtaatcaaaacttccgtcgacctctcccgtcaggacgaaggcgaagaaaccttcggaagcaccccgatagcccgtacaatcgtccgtttcagcatgacacttgccaacggcatctcacgcatcaccccggacagcaccaagaaatggctggacacccgcttccgaaaagacgaagcgatcatcgccgacggaggtgctttcgacctcgtccgcgcctccgtgaaccttgtccttgccggcctgctcatcgcactgggaacttcgctgaaactcccgctgtccaccacttacgtcactttcatggtagccatgggtacttcgctcgccgaccgtgcctggggacgtgactcagccgtttaccgtatcacaggcgtactgagcgtcatcggcggttggtttatcactgccggagctgccttcacgatctgtttcttcgtcgccctcgtgctgcatttcggtggaaatatttcaatcattgccctcatcgctctggcagcattcatcctgatacgcagccaggtgatgtataagaaacgcaaagcaaaagaacaaggcaacgaaactctcaaacaactgatgcaaacatcggacagcgaagaagcgctgcaactgatgcgcaaacatacccgcgaagagctttgcaaagttctcgaatacgcagagacgaacttcgagttgaccgtcacctcgtttatccacgaaaacttgcggggactgcgccgtgccatgggttccacaaagttcgagaaacaacttgtcaagcagatgaagcgcacgggaacggtagccatgtgccgcctcgacaacaacaccgtgctcgaaaaagggctgtactactatcagggcaacgactttgccagcgaactggtgtatagcatttcccgcctttgcgaaccgtgtctggagcatatcgacaataacttcaacccgctggacgctatccaaaaaggagaattcagcgatgtgtccgaggacattacctatctgattcagcaatgccgcaagaaaatggagaataatgagtacaacgatatggaagaagaagtccgccgtgccaacgacctcaacggacagctttcgttgctgaaacgcaaggagttgcagcgcatccaaagtcaggcgggcagtatccgggtcagcatggtttatctgacaatggttcaggaggcacagaacgtggtgacttatacaatcaacctgatgaaagtaagccggaaattccaagtggaaacggaaatgccgtaaaagtcagacggaaatgttacagaagtctcagacagagacgttacgatgaaatatataaaaacacacaaaagagggtttattcaaagtgcagaattactaagtcatttttaggttggggaaccatagatgtacaatgagagataaacccaaaaacaggcagagggtgactaaacagtcggaagttttcagatactcttgacttttagtcaccctctttttttgtccgttccacctgcccgctttcgcttggtggaactacgtgcgggtggcacgttttcgttttacgtcatacttttctttcttttttcctgccggtctctctttttttctgccggctgctaatccttctccgtctttccgtttctccggcgacggaagcgcagaagcgcttcgagaatatcaagcagtttttcaagaaatagtttcatctttttctttttttaaggttaataattcgtttagacagacgggtccggcgttacgccaccgccaccgggtgtgtttccgccgccgggtttgtcatcaccgcccggattttccgtatcaccgtcggcaatcagaccggctgctacgtctttgacgtgtacaaattccactccggcagtcagtgcgcgggtcgtgtttccggcagaccgggtgtactccggcgtgaactgacagcgcagcgaaacgatttgcgagctgctgactttgctttcctgttccacgccttttccgcaggctttggcaaccatagtgaatgttcccaatccttcgagacgcactgtgcggctattgagcaactgttcgcgcatcacggacatcagattccgaatcacgttgtgcacgtcgcccgccgtcaacgaagccttttcggcaatcaattccgccattttctgcgtgttgaccgttctcccgattttcaccaggcggggataaaagagtttctgtccttctttgttggcaagcgttgcctggtaaggtttgtaaattaatggcatactactgttttcctttctttttaatgattaatggatcaattgtctctgtaaccgattacgccgacaaaagtaaacgggccaaagaaagtcgagagacacgatgtgacaagtcgtgacgggagagagcaagttcaaaccgtttcgcacaaatgctgcctgtaagcacttctgtccaaagaagtaccagacaacaaaaaatcacgtacctttataaccgaaacgaacaatccaataaaaaagcagtaacaatgaaaacaactaccacagaaacttcaattccggaagagaaaacaacctccgcccgcatacaagcatacagtaaaagtcaactggccgccctctacctaccccacatccagcctgcctctgcccgccggacgctccgcagctggattgccaaaaacacggaactgcaagcggcactcgcccgttcggggtataccggaaaagcaatcctgttgactcctgcacaagtcgggctgttctttcgatttttgggagagccttagaaagctctccggtaccggacgaacccacatcgagattgatatactcatattcgggacacataaggcaacgtgaaccagaaagtgctgccctcggcaagcgtcctgcgcagccatatcacgtaccatttttaaccaaaaacaatattcccaacccggatagaacggctgttcatctccgggtcgggaatatcttcatttcacaatgtacggatttgcgaacgagtaaaccggtagaaacaagcgttttcccggcagaagattataccaagttctcacagtacttatcttatttgaactcatcatcaatatttctgcgttcattgtcgcccacgggttccttctctccctttttaaataccgtcacatcctttttgaacttaatttcgataaaaaactttctattcccttcgagatagaaatgtacctttgcggcgtttccgaccagataaagcagcatcgttcccaagaggacgaccaaatggttggcgttgacacactcattggaaagacacttgaccagtttgaaaatcgacgaccagctagccgccgttttctgcgttctgaacgagaatatacgtctgaccgttgatatggaggtgtctgtttgtttggcaaaataaacctctttgtaattgttctcataagaacaaattttcacctcgtcgattacttttcctttttcctgccagtcttcttcgtcgaaatcactagatcttctccgattcctctcatgcttgtttgtacccgtttccactttacttttagctgcgttttcaactacattttcaacacttgttttagttccattgtccacagtatcaactgtttcactagataattgttttgtcatcataattaatatttcgtaaataatgccgacaaatatcggatattatttttaacattatgcgtcacgcgtgacactttcttactttatctcctaaaataactcaaacatgaaccctttatgtgttacccttcctctacctttaccgacgaaatcaatgaaaaataattgaatataatgaccgaaattaaaaaaaatcattccctccggcggatacgactcatgaagcgggccgccgttattcgtcaaaacaatggcatggacaaacgcgaggcacttgtcgttgcgcatcagatagacgttttaattcgcaaaatgtacttagctaacgtcagtttttattataccaagcaggacggaagcatccgtcacgccgtaggaacgctcaccggatacgaacattgtttccaccgcccgtatacgccacggccggaaaacacgttcgtcgtctactacgacctcgaagccaaaggctggcggacattccacgccgaaaatttcctccgtgccgaatgaggacgcccgaagaacgcaaagagtgggaaaggctctgccgacaatacaacgtagattcgctctacgaggcgatcgaaggctgccgggaggaactggaattcctcgtccactgcgccgaacgcctcgaaccgctgccggacgatgacacgccggcactccgcccccgccgcgcaacgattgcagaccacgccgtttaacacatacagtccacgccgtttctgtgtgcacgaaacgccgttttatgaagacaggaaacgccgtttctctttccgcatccggcggaggaggactatttttaacaaagcataattttattaacattataaacaacatcaagtatggaaaactggagatttatcaaagaaaacaatgattatatggtgtcggaccacgggcggatcatgagcctgaagaaacctcaaaaaaagatattgagcagcagtctcctccacaatggttatgaggctatatacatctatcagaaagggattcatgccgcgcgctatgtgcaccgactggtagcggaaacgtttatccccaacccgaaaaaactcccgcaagtgaaccacctcgacggaaatacgctcaacaatcatgtgtccaacctcgaatggtgcgacgcctacgacaacttgatgcacgctatccgcaccgggcttcgtcccgttaacgtgccgcgctccattccctgcgccgtgacggacgaaagcgggacgatcctccacccgtacccttccatgaagtcaatggtgaaagaggaaaaactgaacagcgcgcaatacagctggttgcaactgaaactcacgcatcccgaacgggtacggctgcatacgatgcggcggtggcacctgccttatctgcccattcctcccgactgcacccccgtccgccactccgtcacccggcaatattaccggctcctgtccgccgaagaggccgccgcgctgggattcagctaccggagcgtccgaagggagaaaggcattcacttaattatcagcaatttaaaataaacaaaagaaaggagattttcaagatgaaagacgctattatcattcactgttccgccacccgtgcggaacaggacatcaccgccgccgacatcgaaagctggcaccgtgcccgcggattctggacgatcggttaccactatgtcatccgcctcgacggaacaatcgaacccggaagagacgtcaccctcgacggcgcacattgcatggggtggaacaaacgggcaatcggcatctgctatgtcggcggactggacaaggacggtcgccccgccgatacacgcaccgacgcgcaacgcaccgcactcatccgactggtgaaggcgctacggcttgtcttccccggtgtgaagcaggtgctcggacaccgtgacaccagccccgacctcaacggcgacggcgttatctcgcccaacgagtacatgaaagcctgtccgtgcttcgatgttcagaaagagggattctgaactgagtcgtacacatcggtgtcctctgcgatgaaattcagggtgccgcacccacgaaacccgaactaatcattaattttcaattcaatccaaatggcccgtatttccaaatccggtttagattattttccactcgacgtcaatttcctgcaagacagaaaggtacgacgtatctctagccgtcaccacgcagcagggattgccgcgctcacttcactgttctgcctcatctacaaagaaaaaggatattatgtcccgtggaatcaggacacattgttcgacgttgcacaggaagcctgttgcgaggaggcggaaatgcaggccattatcgacgactgtctggcggtgggattattcgacccccatatatataaggtgtatagcgtactcacttcacaagttattcaggagcaatatcacaaaattatcaccgacagccggagaaaatacaaattaccgttggaacatttctggctaatcacggacggagaaacggagcaacaaaaggacgaatacggaaaggaaaacagcatagcaaaaagtgaaaacgaaaatagaaacggaaaccgagcgggaaccggaaacggaactgtcagtgatgcagcagtaaatgatatctatgctacaaaaacaggaattaatgcagtaaaatctcccgaaattgctacaacaatcccacaaacaaaagaggaaacagacaccaaaggtaaacaggaaacggagaaggaaagagataggggaactgaaaccaaagcggaaagagatagagagaaagagatagaaaaagacaaagagacagagaataggcggaaagccggaaaagagacagagaatgaaatgccgcccgtgccgtcaaacggcgtttttcaggctccgcctgtcgttgtaagtggtttgtcttttggaaatttcggaaattcttctgaaataaaagaatgttattctgaagtaaagggaacttatcctgaagaaaagggaacttatcctgaagtaatagagaatccttccggagaaaaagggaatccccaaagagataacggaagaaacagcattcccccccaaggagtaaccgccggaggcagttccgaaactctcctgcacatgaaccttcaaacaatcggcatccggaaagaacagaccgtgaacgcaatcaccgccctcgcccgacgcaaagaactgggcggaccgggaggtactttatggaagattctcagcaacgaataccgccccaccctgctcaaaaaaaacgaaccgggagattacatcctctgggcccttaatcatccgacggaatttgagaacacctacaacgggacattgaagaaactggtgagaggaaggtgacgcgggtgcaaccgcaatcacctcaacgttccgaagcccctgtgctatgaaaaaaatcggttcttcttcaaatttggtggttatttagccagtcggtggtatctccattcccctccttcggggaaggaggggtggctgaaagccggggtggtaggtggatacacaatgctgataataactgacttacgcattcacctaccacctccccctacggggactcctccttcccgaaggaggagaatggagaatactatcgactatcaaattattattgaatactatcgactatcaaattattattgaatactatcgactatcaaattattgttgaatactatcgactatcaaattattgttgaatactatcgactatcaaattattattttctcaattaattttaccaccaaatttgaagaagaatcaaaaaatcccatagttgccccctgtatgaaaaaagaactctaataatccacccctataatgaaacaaaactctaacaataaacgggaacgaaaaaaaaataaacgggaagaacaaaaaaatagaccgaccgtaaagtccgcctatttcatttttcaagtgcgccttgtgataccctatttctactaaacggtaccggtcccgcagttctaccctatttattctttttaagtatctattctaccattgcaagtcgggtaagtatttacttagggtggtacggagaatactcaaagtgatcggtttcaccaacacttcggtagctcccgccttcatcgcgttttccttgtcggagctgaaagcataagctgtctgcatgataatggggatttccgtattcgactcacgaataatcttcgtagcctccagcccgttcatcaacggcattttgatatccattagtatggcactcgctctatattggtgttcttgaaacaactgcaccatttcttcgccgttcttcgcccattcgatatcacattttttacctatgatagctttaatcaatttaaagttgctgtcgtcgtcctcagccactaaaatgaggggtctcagtacactcgtttgttcactttccatattgttattatattgctttttttatttgtcatttttggttaatatctcttttcagcccgcaaggtataaaaaatattcatatatttcgctatctttgcgcctcaaaataaaagaataatatgatttctgttgacggactggccgtggaatttggcggcacgaccttatttagtgatatttctttcgttattaatgaaaaagaccgtatcgcccttatgggaaaaaacggtgcgggtaagagtacgctgctcaaaattctggcaggtgtacggcaaccgacgcgcggcaaggtttccgcacccaaagactgcgttgtggcctacctgccccaacatttgatgacggaagacggacggacagtgtttgacgaaacggcgcaggcctttgctcacctgcacgaaatggaggcgcagatcgaccgtctgaataaagagctggaaacgcggacggactacgaaagcgacagttatatggctctcattgaggaggtttccgccttaagcgagaagttctattcgatcgatgccaccaactacgaggaagatgtggaaaagtcgctgctcggcctcgggttcacccgcgaggatttccaacggcagacgagcgatttcagcggcggctggcggatgcgcatcgagctggcaaagctgctgttgcagaaaccggacgtgctcctgctcgacgagccgacgaaccacctcgacatcgaatctatccaatggctcgaagattttctgatcaacaacggcaaagcggtgattgtcatcagccacgaccgcaagtttgtggacaacatcaccacccgcactattgaagtgacaatgggacgtatctacgattataaagtgaattactcccaatatctgaccttgcgcaaagaacgtcgcgaacagcaacagaaggcttatgacgagcagcagaaatttatcgctgagacgaaagagttcatcgaacgcttcaaaggaacgtattcgaagacgttgcaagtgcagagccgtgtcaagatgctggaaaagctggaactgctggaggtagatgaggaagatacttccgctttgcggttgaaatttccgccttcgccccgttcgggaagttatccggtgattatggaaggtgtcggcaaaacgtatggcaatcacgtggtgttccgcaacgcaaacctgacggtggaacgcggggacaaggttgcctttgtcgggaagaacggcgagggtaaatctacgctcgtgaagtgtatcatgaaggaaatcgaacacgaggggacactgacgctgggccataacgtacaaataggatattttgcacaaaaccaggcttcgctcatggacgaaaacctgacggttttccagacgatcgacgatgtggcgaaaggtgagatccggaacaaaatccgtgatttgctgggtgcgtttatgtttggcggaccggaggaatcaatgaagaaggtgaaagtgctttcgggcggggaacggacacgtctggcaatgattaaattgttgctggaaccggtcaatctcctcattctcgatgagcccacgaatcacctcgacatgaaaaccaaagatattctgaaacaggcgctactcgacttcgacggcactctgatcgttgtctcccacgaccgtgacttcctcgacggactggtttcaaaggtgtatgagtttggcaatcagaaagtgacggaacatctttgcggcatctacgagttccttgaaaaaaagaaaatggattcgctgcaagaactggaaaagaaataaaattgccggtagtatacctttattgccgatagtatccctttattgccggtagtatccctttattgccggtagtatccctttctctttcttcccgaaggaggagggttcttcttcaaatttggtggcaatttaaccagtcggtggtatctccattcccctccttcgggaaggaggggtggctgaaagccggggtggtaggtggatacacaatgctgataataaacgatttatgcattcacctaccacctccccctacgggtactcctccttcccgaaggaggagaatggagataccaccgactggttaaattgccaccaaatttgaagaagaacaaataataaaagatgttatcggcttttaacggagaaaaagtttttgtatctttgtaacgttcaaataatcaagctgaagccgatacatatccaaaagaaaggatgaaaaggaagaaacgatatatagtaacattgctgctttttatcaacattatcatgttgacggcagccgttattcctcatcatcaccaccccaacggagcgatttgcatgaaacaggacttgcccgtagaacagcaatgtcccaaacatcatcatcatccggcaagcgactcatgttgcagcagcgaatgtatgacgcgcttccactctcccattccttccttccacacagatagcggaccggactacgtgttcatcgccaccctgttcacggacggaatcatcgaacatctgctaaaaccacaagaaagacgggtcaagaactattacgtctaccgagactcgctgcacgggacgaacatcccccgtaccacctctctccgcgcccctccctattctgttttcgcgtaagaccaacgtgaatgcaaacttgttgcatctgcgtcaccctatctttgtaacgtaaaaacagtaaattttagtaggaaaatatcatttatgaaaaaacttatttttatgggaatcctgggcttattcgctttaggagcctgcaataacaagaatacacaaggtcatgaaggacatggccatagtaccgtcacacacaacaacgatgaacacaaccatgaagcggaaggtcacaaccatgaagcggaaggacatacccatggaacagaaggagaatgcaacggcgatcataaacatgatgcggccgacaatcaccaaggcactgctgccggacacgatgaaactgccgaagccgcccacagcgacgaaatcatcctcccgaaagcgaaagccgatgctgccggagtgaaagtaagcattgtagaacccgcccctttccaacaagtaatcaagaccagcggacaggtattggctgcacaaggcgacgaatccgtcgcggtagccactgtggcaggtgttgtctcattccgcggaaaggtgacggaaggtatgagtgtaggcagcggcactccgctagtgaccatttcctcgcacaacatcgcagacggcgacccggtgcaacgtgcccgcatcgcttacgaagtgtcgaagaaagaatacgaacggatgaaagcgcttgtcaaaaacaaaatcgtatccgacaaggattttgcacaggcagagcaaaattacgagaatgcccgcatcagctatgaggcgctcgcaaagaaccattcggcaatcggacagaacattaccgctcctatcgccggctacgtgaaaagtattctggtgaaagaaggggattatgtcacaattggccagccattggtcagcgtgacacagaaccgccgtctgttcctccgtgccgaagtgtcggaaaagtattacccgtatctccgcacaattaattccgccaatttccggacaccatataataataaggtatatgaattgggaacattgaacggccggcttctctcgttcggcaaaacagcgggagacaactctttctatgtccccgtaacttttgaatttgacaacaaaggcgacatcatagccggttcgttcgtagaggtctacctgctttcctcccaactggagaatgtcctttcccttccccgcacggcactgaccgaggaacagggaatctactttgtatatctgcaacttgacgaagagggatacaaaaagcaagaagtgactttaggcgccgacaacggcaaaaatgtgcaaatcctcaccggaataaaaccgggcgaccgcgtagtgacggaaggagcttatcaggttcgtttggcaagcgccagcaacgcaattcccgcacacagccacgaacactaagcggcaaggcgccgcagccggattgctttgcggtgcatctatctcattttttatcactcaattgatgaattatcatgcttaacaaaattatacattactccctgcataacaggttggtcgtactctgcgcggctttcctcctgctcatcgcgggcacctacactgccatgaataccgaagttgacgtcttccccgacctcaacgccccgacggtggttatcatgaccgaagccaacggtatggcagccgaggaagtggaacaactcgttacctttcctgtcgaaacagccgtaaacggtgctaccggtgtacgccgtgtccgttcttcgtccaccaacggcttctccgttgtctgggtggaatttgactggggaacagacatctacctcgcccgccagattgtcagcgagaaactggcggtagtcagtgaatccctccccgtcaacgtgggcaagccgacgctgggcccgcaatcttctatcctgggcgaaatgctgattgtcggtctgaccgccgactcgacctccatgctcgacctccgcacgattgcggactggacgattcgcccgcgcctgctgtccaccggaggggtggcacaggtagccgtgttgggcggagacatcaaagaataccagattcaactggacccggaacggatgcgccactacagcgtttcaatgggtgaaataatggctgtcacccaagacatgaacttaaacgccaacggtggcgtactttacgagttcggaaatgaatatatcgtgcgtggggtactttctaccccgaaggtcgaggagctaggcaaagcagtcgtaaaaactgtaaacactttccccgtcacactggaggacatcgccgacgtgaaaatcggccccaaagctccgaaactgggaaccgcttccgaacgcggcaaacctgccgtactaatgacagtcaccaaacagcctgccactagtaccctcgaactgaccgacaaactggaagcctctctgaaagacctccaaaagaacctgcctgccgacgtgaaagtgtctactgatattttccgccaaagccgtttcatcgaaagttcgatcggcaacgtgaagaagtcgctttttgaaggcggtattttcgtggtgatcgtcctgttcctgttcctggcaaatgtacgtacaacggtgatctcgctggtgacactgcctatctcactgctcgtctccattcttacgctgcactatatgggattgactatcaacacaatgagtctcggtggtatggccattgctatcggttcactggtggacgacgcgatcgtggacgtcgaaaacgtgtacaagcgtctgcgggagaaccggcagaaaccggaggccgaacggctcagtacactggaggtggtattcaacgcctcgaaggaagttcgtatgcctatccttaattcgacgttgattattgtagtcagttttgtccccctgttcttcctgagcggaatggaaggaagaatgttggtcccgctgggcattgcgtttatcgtggcgttgttcgcttcgacggttgttgcgctgacgctgaccccggtactttgctcgtatctgctgggcagtaacaagacgaacaaggaactgaaagagtcattcgtagcccgttggatgaaagggatttacgggaaggcactgacttgggtactggcccacaaacgggtgactttgggaagtacaatcggactgtttgtggtcgctctcggtgtgttcttcactctcggacgcagcttcctgccttctttcaatgagggctcgttcacaatcaacatcagttcgctgccgggcatttcgttggaagaaagcaacaaaatgggacatcgtgccgaggaactgctgctgacaattccagagatacagacggtagcccgcaagacgggacgtgccgaactggacgagcacgcgcttggcgtgaacgtctcggaaatcgaagctccgttcgagctgaaagaccgtccgcgcaacgagctcgttgccgaagtgcgcgagaaactaggaacgatcaccggtgcaaatatagaaatcggtcagcctatcagccaccgaatcgatgccatgttgtccggtacaaaggcaaacatcgccatcaaacttttcggcgatgacttgaacaagatgttctcactcggcaaccggataaaggacgctatcggagatataccgggcattgccgacctcaacgtggagcagcagatcgagcgtccgcagttgaagattcaaccgaaacgggagatgcttgccaagttcgggattaccttgccggaattctcggaatatgtcaacgttgcccttgcaggaaaagtgatctcgcaggtttatgaacagggaaagagcttcgacctcatcgtaaaagtgaaggatgacgcacgggacgaaatggagaaaatccgtaacttaatggtagacaccaacgacggccgcaaagtgcctctgaactatgtggcggaagtggtttcggccatgggaccgaacacgatcaaccgcgaaaacgtgaagcgcaaaatcgtgatttccgccaacgtggcggaccgtgacctccgaagtgtggtaaacgacatccaaaagcgtatcgatacgtctatacagctccccgaaggctatcacatcgaatacggcggacagtttgaaagcgaacaagccgccagccggacattggcgctgacgtcattcatcagcattgttgtcatcttcctgctgctttacaacgagttccgcagcgtgaaggaatccggcgttatcttgttgaacctgccgcttgcactgatcggcggtgttttcgcactggtcatcacgacgggtgaggtcagcattccggcaattatcgggtttatctccctgttcggcattgcgaccagaaacggtatgttgcttatcagccactataaccacctccaaaaagaggaaggactgaatgtatacgacagtgtcatgcaaggctcgctcgaccgtctgaacccgattcttatgacagcgctttcgtcggcactggcactgatcccgctggcgctcggcggcgacttgcccggaaacgaaattcaaagtccaatggccaaagttatcttgggcggacttttaacctctacgttcctgaacggtttcatcgttccgattgtttacctgatgatgcaccgccggcctaccgacgctgcaccggagcaagaatccctcgcgacaccctgctaatcatcagccagacgtaatagaagaaacaaataaaagaaaaagtatgaaacggattatcattataagttcttttgctgccactgcactcttcaccctgacggggggtgtgcaggcacagaacagcatagaacaggtattaaaaaatatagaaacgaacaacaaggagttgcaggcgaacgcccaactgattacctcgcagaaactggaatccaaaacggacaacaacctgcccgatcctaccttgtcctacgctcacctctggggagcaaaggacaaaaacgaaacaatcggcgaactcgtcgtttcgcagagtttcgacttccccagcctgtatgccacgcgcaataaactgaaccggttgaaggcaggggcttacgacagccaggcggacgtattccgtcaggacaaactgttgcaggcgaaagaagtctgtctggacattatcatgctccgccagcagaaacaaattctcgaagaaaggctccgcaacgcggaagtactcgctgaaatgtatgccaaacgtctccaaaccggagacgccaacgccctcgagacgaacaaaatcaatctggaattactgaacgtccgcacagaagcctcactcaacgaaacggcgctccgcaacaaaatgcaggaactgaatacgctgaacggcaatatcccggtggtctttgaagaaagccggtatcccctcactccttttccctccgattaccagatcttgaaatcggaagtgctctctgccgaccgtaccctcatggcgctcggcaacgaaagcctcgttgcccggaaacaaatagcggtcaacaaatcgcagtggttgccgaaactggaactgggatatcgccggaacacagaaacgggtacacctttcaacggggtagtagtcggcttctctttccctcttttcgaaaaccggaacaaggtgaagattgcgaaagcacaagctttgaacatcgacctgcaaaaagaaaatgccacgttgcaagttgaatccgaattgtcacagctctatcgtgaagccaaagcactgcataactccatggaagaatataaaaagacgttccggtcgcaacaggacttggcattgctgaaacaggcactcaccggaggacaaatcagcatgatagagtatttcgtagaagtatctgtcatctaccagagccaccagaactatctgcaactcgaaaaccaatatcagaaagcaatggcacggatttacaaaagtaagttgtagaccttatccggcctttacaacacgcggatcttttccggcaaatacccgctacggatacgccattcctgcggataaagattattagcccggttgccgatattcttcacaaaacccagaggaatattgcgataagtgagcaaaacatacccgcgaggggctgtcgccggcaaagtgacagcctctttccgcaaataagcgattgcttgttcataactcaccgcctcggttgcaaaaacatcctgccgcagaagaagggcactcatggccaaggcatgggcgggaatcagatcttttcctttcacctcgccaaccgaaacgcctgcctgcaccacccgcaaatgttgtttcatggcagccagttcggctacgcattgctgaggaaacgcgtgtatttcagcaccttctgccgacaagacgtactttccggcacactcatcattcagccattttccggccgttgccatgttttccttggagacaggcgaagaagaggctcccccacctttcttacctttttttccggcggattttcctttcggaaacgaataataatcggcataactgtcctcccctgccgtttccggtttgcggagtacggacaagaaaaagccttcacccttcgtcttatgcgggaaaaagtgatatacggaagccgattcgccgcacagcagatttcctgtgatattccactcttcccgaatatctaccgccaacgattccgccccaaattcctgctgaatccaacggacattttcttcgtcctctttcgtgttatatgtacaggtactgtatataagaatgcctccgggtttcagactcggccaaacgtccgcaataatcctccgttgccgttgccagcaaatttccacattctccggactccattcttcaacggccaccgaatctttacggaacatcccttcgccggagcaaggcacatctgtcagaataacgtcaaagaaagaaggcaaagccgaaaaatcagccgggtcgttattcgtaaccaccacatccggatgtccccatttcgtcaggttctccgccaaaatctgcgaccggttccggattacctcgttggcaaccagcaaactaccttcgggcaacacactacgagcatgggtcgatttccctcccggagcggcacaaaggtcgagcatcaccaccggcttcgtgacatgctgccggagcacctgttccacgaacatcgaagaagcctcctgcacataataacaccctgcatgaaacaacgggtcgaatgtaaaagtgagccgttcgtcgaggtagattccctccgaagaccagggaggttgaaccgatagagcattttccactttcagccgatgaactttcaaccgattcagtctaatgctcacaggaggttcctgctgcaaggcggaaaccagtttttcgtattcttcgacgcccaacaaagcgcgggtatattctgtaaaagaagcgggtaaattcattttcatttattaatttgcgcaaatatcaaaaatatttcgtctctttgcaactttctcggatactaactgcgtctaacagacaaagaaacaaattaaaaaataacaaatatgaaacaaattctaatagcattattgctcgcattcaccacttcgacagtaattaatgcacaaaaacagagtagcattgagaaggattctaccgaaaatgtgaaagtgaccctttcgaaaaagacagacaccaaggcggatgaatccaacacaacagtgacggtgatcggcgtagatacaacggacatggatacgacggcgggcaaggatgacaacgaccttcccttcggcaacctcagcgacacgatcagcggagggatcctgatctctattatcgcaatcgtcgccgtcttcggactgcccgtatttatcttgtttgtaatctttttcttccgctacaagaaccggaaagcccgttaccgccttgccgaacaggccattgcagccggacaaccgctgccggaaaactttatccgcgaaaaccggccggccgaccaacgctcacaaggcatcaaaaacacctttacagggatcggacttttcatcttcctctgggcgatcaccggagagttcggaatcggagcaatcggactgcttatcatgtttatgggcatcggccaatggataataggcagcaaacaacagaaaacagatgatgttgatcctttccggatgaacgtttcccggaaaagagacatcgacacagccgccccttcggcaacgcagcaggaagaaagaaacggagaaaagagcgacgaaaataaatgagccaactcaacgatatatcgctagtcgcacaggtcgtagtgttcaaaaacactagggccttcgaccagttagtgaagaaataccagtcgcccgtgcggcggttctttctcaacctgacttgcggcgacagcgaattgagtgacgatttggcgcaggatacattcatcaaggcatataccaatctctcttctttccacaacctgtcgagtttctcaacgtggctctaccgcattgcctataatgttttttatgattatattcgcagccggaaagaaatggccggcttggacacaacggaaatagatgccattaacagtaccgaacaagaaaacgtcgggcagaaaatggatgtctaccagtcgctcaaaacgctaaaagatgtggaacgaacctgcatcaccttgttttatatggaagatttaagcattgacaagatcgcaggtattaccggaataccggcaggaacggtgaaaagccacctgtcgcgtggaaaagataaattagcaacgtacttaaaacaaaatggttatgacagaaatagacaatgataaactcttgcgcgacttctttaccgaaaacaggcaggagatagcggacaggggattcagccgccgtgtcatgcaccacctacccgaccgcagcaatcggctggcacgcatttggaacgccttcgtcatggctgtgggagccgtacttttcgtctccttaggtggaccggaagctgcatggggaacgattcgggaggtattcatcggcatgattaatcatggaacaacaagtctcgacccgaaatcaatcattatcgcaagtgtagtgttactgtttatggctgcgagaaaagtagcttcattggcataggcggtacggaaatgttaagatgatactatcgactgtttaatcagtccccattattttcctcttaatttttcccttactaataaagctatccgagtgttaaacaataataaatctaccctttgtccccgattagcccaaacatagatgttgtatctttgttgctctgtaaactaaaatagagagaaaagttttgaaattacgtatattcattttattcctgttcctgcctttattgcgtgcccaggcaagcgtcatcgacagtttgatgacccacccccgggattctatcggactcacgagtgattcccttgtactgcattttttagaggaatcgggtatacctatctccgataataataaagtgaaactgctgaaaagcgggcgggaaaagtttatcgacttgtttgaagcaatccgtcaggccaagcaccacgtgcatctggaatatttcaacttccgaaacgactctatcgccaacgccttattcgcccttctcgccgaaaaagtaaaagaaggtgtcgaagtgcgggcaatgttcgacgctttcggcaactggtcgaacaaccagccactcaaaaaaagacatctcaagaaaatccgtgaacaagggattgaaatcgtcaagttcgacccgttcactttcccttatatcaaccacgccgcccaccgcgaccaccggaagattgtcgtaatcgacggagaaatagcttataccggcggcatgaacatcgccgactattacatcaatggactacccaaaatcggtacgtggcgcgatatgcacatgcgcattgaaggcgatgcggtgaacgatttacaggagattttccttacaatctggaacaaggaaaccaagcagaacatcggcggggaaatttatttcccccaacatgaagacagtacaaatatcgttgtcgctatcgtagaccgtactccgaagaaaaacagccgtatgctaagccatgcatacgccatgtcaatctactcggcacaaaaaaacgtacatatcgtcaatccttatttcgtgccgacttcttctatcaaaaaagcgctcaaccggacaatcgaccggggagtgaacgtaacaattatggtttcgtccgcctccgacattcctttcacgccggatgccgcactttacaagttgcataagttgatgaaacggggggcaacagtttatatgtacaacggaggattccaccattctaaaataatgatgatcgacgacttgttctgcaccgtcggcaccgccaacctgaacagccgcagcctccgttacgactacgagacgaacgctttcatcttcgacaagaagacaacggcggaactgaacaccatgttccgcaacgacatcgagcactgcacacagttgacaccggaattttggaaaaagcgctcaccatggaagaagttcgtcggctggtttgctaatttattcacgccatttttgtaattttgcacaaagaggatgactaaaaagccaatagtatcccaaactctcctccttcccgaaagaggggattggagaggctaccgacttttaaacacagccttgcaaatgcattaacgctttgataatttactcattatgaaacaatatctcgatttactgaaccgtgtgttgactgaaggcacggagaaaagcgaccgcaccggtaccggaacgatcagcgtgttcggtcaccaaatgcgcttcaacctcgacgacggctttccctgtctcaccaccaagaaattacatctgaaatcaatcatatatgaattgctgtggttcctccaaggagacacgaacgtgaaatacctgcaagaacacggcgtccgcatctggaacgaatgggcggacgaaaacggtgatctgggacatatctacggctaccaatggcgttcgtggcccgactacaacggcggattcatcgaccagatcagcgaagcgatagagacgatcaaacaaaatccggactcacgccggattattgtcagcgcatggaacgtagcggatttgaataatatgaacctccctccctgtcatgcgtttttccagttctacgtagcggacggacgactgagcctccaactttaccaacgcagcgccgacattttcctcggcgtgcctttcaacattgcttcatacgcactgttgctgcaaatggtagcgcaggtgacgggattgaaggccggagacttcgttcatacattcggtgacgcacatatctatctgaatcatctggaacaggtaaaactgcaactgtcccgcgaaccgcgtccgttgccgcagatgaaaatcaacccggatgtgaaaagtatcttcgatttcaaattcgaggatttcgaactggtgaattatgacccgcatccgcacatcgcaggtgtggtagcagtctgaccccggcacgatgcagacgggagaatatcaaacgaacctcaaatccgcaactacgcgcctaatatgatacagaagcgaaaagaatctgcatcgttagtaaaaagggggcacagtgcatcgaatgtcaccataaagacatataaatgccccttaccccaccatgcgacttgaggcaatacgcaaaatcacgactataagttgtcggtgttatccaaagtcattctggaacacattggcataagcattgttgcatgaatagatattcagcacatacttccttgatgtcctgacccatttggctggcacagagatgaacttaaagacaaacgtcttgatgcggcttgttgctttgagtccgaacctcttcacgtcaagcctcgccatgatgaatttatagaagttgcgtatgagtgccataagcagaagaaacaccgtgttttctcccataaaggattttggaagcctgttccagccgaatccgttattcatatcatcgaagatgcgttccttccctccacggaggttatagaattcgacaatctctttctcggaagactcgtagtcatttgtaaggatgcagcggtaggtgtattctccttcccacaggtcgagttcgccgtctatccgcttctgtctttgaatcacaagacggtatgccttccctttccatttctcgatgagaatggaggccagctcaaactcaatgccgcccaattccactttcttccaacctctgagggcaaagatgtcattgtagagcgaactgcatcggttagcacggatatagaaggtcttgcagtgtttagcaatctcttccactatctcttcagaacacgagccgcaatcagctctgaaacggttgataataagcttgttttgttcaaacctttcaaagaacctcttcagcgtgtccttctggtggaaacggacatttgtgttgccgtcgctgttctcaatgccgacaatcaagttgccaataaccgccacgccagggcgataaccaaggaacttcttgtatgtaggcttcgcatcaaacttctcagcctctatgaactggtggtcgaagtcaacgtcatacccctcgccctctttcagctgccctgtggacaataggcaattgaggagcagtgtattcagcttgtctgccgtgttgaagtcgtaggtcttgccagtgtcggatgtgtaggaaatgttatcctgggtcagttcctttatggctctaagaatcgtgtcggcactgcatgtgcgaagtgtcggatgaagcgaaaggtggtacatcagatgagtggtgacatcctcgatgcatgagccgccacaaaaataaacgctcataagcgaacggatgatttcgctgtattgataaccatacagcctgcatctcataccgagggttgagtcgattacagatgagagtctggagtcaaattgctccattattgaaaatattcctccaaaaggagtgagtttctcggatttaattgctacctttgccatgtctgtcgggtttgatacatattttgatttgcaacactaagataggtgaaaaatctgacatggcaaattcctgagcaactttttgttgctcaggtacttaaaaagttatatttgtaatagtgttgcggaattaaggacgaacttaatctgtatgagtaaaatatctattatagcggccgtagaccgccgcatggctatcggattcgagaacaaactccttttctggttgcccaacgacttgaaacgtttcaaagcactgaccacgggaaatacgattgttatgggaagaaaaactttcgaatcactccccaaaggtgccctgcccaaccgcaggaatgtcgttctgtcttcaaatccggctgcggaatgtccgggagcggaagtattcccttcactcgaagcggctctgcaaagttgcaaggaggatgaacacgtatatatcatcggcggcgcaagtgtctaccaacaggcgcttccctttgccgacgaactttgcctgacggaaatagacaacaccgcaccggaggctgacgcctttttccccgaagtctcgcccgccgtatggcacgaaaaaaacagagaagctcatcctgcggatgagaaacatctctgctcgtatgcatttgttgattacgtaaaagcgtaaaaaacaactattacaacttattaatcttcgtcttctacgtcgaccatgatcggcatctgccgtttaatggcttcgtggaaggagattagcgtttcggtacgcgccaaccccaacggttgcagcttatcgtggataatgctcagcaaatggtggttgttcttagcataaatcttgataaacatatcatattttccggtggtgaaatgacattctaccacttccggaatcgcttccaaggcttttgtcaccgaatcaaaggactcggggtccttcagataaatgccaatataagcgcaagtctcatatcctatcttttcagggtcgatcacatattccgaaccctttaatataccgagattagtcagcttctgaatgcgctgatgaatggccgcgccggaaacgttacaagctctcgctacttccaggaaaggaatacgcgcattgccggctattaacttcagaatctgctcatctaaactatctaattgatgatgtcccatatttgaatcaaattgttttaatcgacgaatcttttatgcaaagttagcgattttccggcaacaaatactataatttattacttttatttgcagaaagcggataagtcaacaatagtttgtacctttgtggaaaacataaatatactatttatatgaaacaattttgctgtacactgctttttttccttgccactctgacaagctacgcgcaaaattttgcggacttttttcaagataaaacattacgagtggattacattttcaccggagacgccaaccgtcaggcgatctatctggacgaactctcacaactgccttcctgggccggacgacaacaccatttatccgaacttcccttggcgggaaacgggcaaattatcgtgaaagacgttgccaccggacaatgtatttataaaacatccttttcttcactgtttcaggaatggctgtcgaccgatgaagcccggacaaccgccaaaggattcgaaaatacgtttctcctgccttttcccaagaaaacggtagaagtagaaattacgttatattcgccccgtaaggatgttatggcaaacttcaaacatattgtatcgcccgaggatattttaatccacaaacgcggcacatcgcacgtcaccccgcatcgttatatgttgcaaagcggcagcgagaaagactgcattgatgtcgccattctcgccgaaggatatacggaaaaggaaatggatgttttctatcaggatgcgcaacgtacctgcgaaagcttgttctcacacgaaccgttccggtcgatgaaacagaaattcaatatcgtcgccgtagccagcccgtctaccgacagcggcgtaagtgtcccccgtgcagaccaatggaagcaaactgccgtccactcacatttcgacacgttctattccgaacgttatctgactaccagccgggtgaaatcgatccacaatgcgctggcgggaatcccctatgagcatattattatcctcgccaacacggatgtatacggcggaggaggaatctacaattcctacacgctgaccactgcgcatcatcccatgttcaaaccggtggtcgtccatgagttcggacacagtttcggtggactcgcggacgagtatttttacgaggatgatacgatgaccgacacttatccgctggatgtggaaccgtgggaacagaatatcacaacacgggtgaacttcgcctccaaatgggaagatatgctccctccacacataccggtacctactccggttgcccaacaaaagaattacccggtaggcgtgtatgaaggaggtggttattcattcaaaggtatttatcgcccggcgtacaactgccgcatgaaaaccaatgagcatcccgaattttgcccggtctgccaacgcgcaatccgccggattatcgaattttatgtgccataaagaaataacgtttgtcaaacttaaaaacccaagcctttatgattaagcttcaaccgatcagcacatcggatttacaacattacaagtttatggaagaactcctcgttgatgcatttccaccggaagaataccgtcaattggaagagttacgcgagtataccgaccggacgggcaactttcataataatatcatctttgatgatgacctgcctattgggttcatcacatactgggatttcgaccgcttctactatgtagaacacttcgccaccaatcccgccctgcgcaacggcggatacgggaaacggacgttggaatacttgtgcaaccacctgcaattgcctatcgtactggaagtagaacgccccgtagaggaaatggcaaaacgccgtatttgtttctacgagcgtcaaggattcaccttgtggaaaaatgactattatcagccgccctacaagcccggagatgattttcttccgatgtatttaatggtgtacggtgacttgaatccggaaaaggattacgaagatataagacataagctccacactgttgtttacggggtaaaggagtaaaagtaaatcaaagcaaatcaaagcaaatcaaagtaaaacaaatcaaagtaaaaatcagtaagactccggttaagagattgaccggagtcgctttataaatatatattcttcttcaattttagtggtaaggttgattgggaaaataacaatttgataattgatagtatccaccactctcctccttcaggaaggaggagtacccgtagggggaggtggtaggtgaatgcgtaagtcggttattatcagcattgtgtatccacctaccaccccggctttcagccacccctccttcccgaaggaggggaatggagataccaccgactagttaaatgaccaccaaatttgaagaagaatctaaatatacaaataaaaaaaactgttcccaataaaaaaaggagggcttccaattcagaattggaagccctccttttttatatatcaaattaactatttatttctcaccacgtttagtagctgagtagttaatcttcaaagcgtatgactttctaagagcattttttacgtcagtaacaatacccattttagtcttctggtctactttcagagacacagtcattttggcagcgtcaccctcactcatactagcacgttcctggaagatgaagtcctgtacttcgcccacttcagcatagctgtcgttgagctgaatacggctttcagtacccattttcgcacgatattcctgagtcggttcgcccacataaatgaatgtcaccaatgatttcttctccagtttttcgagttcagtaccttgcggaagtgtaaactgcacctttaatgttacctcacgcattgttgttacaatcataaagaagaacaacaaggtaaagataaggtcaggcaatgaagaagtattcaaagccggcatttcacgtttaccagtcttattaaattttcccattacttactactttttttctccgtattttttaggttctgcttcagaaattcgttgcggatagatttcacgaactgccttttgctgttcgtcactcaactccgagtatttaactccgaatttttctgttgctaactcgtctctcaattcattatatgcagccaccaattcgttctgcacactaatatatgcctgataagaagatccacggtcgttctgcaaagaaattacgtgcttgtcattaaccatatatgtaccgaagaattccacattcttttgtgtcttttccggcatgttctctgcgttattaacgttagcgataaattctttggctttctgtctcaactgatcaactccgatataatcatttccgcacatcaaagcatcatctttattcagataaacctgcaggatgttacgttctttaatcttatcggtagtatcatcattctgttcttcgggtggtggaggcaaaagtcttgccaaaccacggtccgtatccattgatgtcgtaatcaagaagaagatcagcaacaagaaagcgatatccgccgtagaacttgagttaatatcaggaacttttctttttccttttgccattttaattacttatttaatcgagtatcctcaattgattacgataattttttctttataccactcacaatgattgcaacaacagtcacaaacaacaaaatgtaaatagaataaaggaacatatcagtcagtttcagccagaaataaacgttatctgtaccttcataacccgggatattcatcggcgtaccgctacccatagcccaagctataattaaaacaacaaccaaaagaaccaaaccaagcaaagatttgatagcagaagccggattatcttttaaagctgcaccaaattggaatacggcagcaatcacagtagctgcgatagcgataccaaacaaagcatacatcaaatagagtaaggcgtctgtttgagccggctgccacatttcgggatctactcccggaatcactgcatcgcccgtagcgtctcctccaaagaagaagatacccattacgatgaggataatggcaaacatcgcatacagtgcgtagtacgatgccttatatgttaacttactcatttcaaattattttttgtatttcagatcatatttgattaccatgtcaagcaaagagatagaagaatcttccatttcgcttgtaagagcttcaatcttagaaagtacgtagttgtagaatacctgaagaatcaaagcaacgatcaaaccgaagatagttgtgatcaaagcgactttcataccacctgctacaaccgtcggagagatatcacctacctgctggattttatcaaatgcctgcaccataccgattacagtacccaagaatccgagtgacggagccattgcgataaacagtgtgatccaagaacatcctttttcaaggtaaccagcctgtacgccaccgtaagatacaactgacttctcaactacatcgataccttgatcgattctcatcagaccttggtagtagatagaagcaacaggacctctagtgttacgggcaatgtctttagcagcttcaacatctcctttttccaaagcagcttcgatagatgccatgaatttctttgtgttgatttcagccaagctcaaatagatgatacgttcgatacagaatgccaaaccaatcaccaaagcgattgctaccaaactcatgaaagatgcagtaccttcgatgaatttaactttgatttccttgtgaataccaccttcttctgcagcaggagcagcagctgtagtagcttcagcagcaggagcagcttgttgttcagtttgttctgctgcaggagcgtcttgagcctgagcaagttgaattgagccaaatgtaaaggccccaatcacagcaacaattgcaaataactttttcattgtgtgtctaatttttaagattaattaattgattattatttattgtatttacttcacatttctcttttcattacgcggagagacggggattcgaaccccggatacacttttggcgtatacacgctttccaggcgtgcctcttcaaccactcgagcatctctcccaatgggtttcccgcattttcagctacaaatgtatccttttttttcttttcataaagcattatccgttttttatcttgaataaatactgcaaattaatataatttaaaacctttcggagcttatttgcggattacaaacacttttagcgcgttttcggtagtgacttgtgcaacgtactccggattcatctgataaatctcagctattttcagaaaggtgtcccgcacattgacgctctcattcctttttccgcgattcgggacgggagtcagatagggggaatcggtttcgagcacaatacgctccaagggaactgtccgcaaagtgtccggcaaagttgactttttaaaagtgaccactccgttaatacccagcataaacccttcaaactccaacaacttcgccgcctcatcgggcgtcccggtgaaactatgaaaaataccggtcaatggggtgtttttataggttttcattaccttatatatataatcgaacgcctccctggaatgaataacaataggaaaattgtattcaagcgcccactcgatctgcttttcaaggacaaacagttgctcgttcaggaaggttttatcccaataaaggtccagtcctatttcgccgattgccacgaagttgttcggggccgacagacgttcacgtacaattgccagttcccgctcgtacgtctcgttgaccgaagtcggatgcagaccgatcatcggataacaaaggtccggataatcggcgcagacagacaacattggttcgattgtcatactgtcaatattgggcatgaaaatatgggaaacgcctgctttccgtgcacgttccattacctgtggcaaatcttcggaaaattcttctaaaaaaagatgagaatgggtatctatcagcatgtcagttcgttttcttcttttactttttcgctggaacggtaataatagatcaatccgtaatcacggcatttatccagtcggacttcattcggagtgacgtcctgatatttagtttccacctgattccagatgtccagaattaattcgtcggcacgaccacgcatggaagcgagttcttccaagctgcgattggttagtgcctgaaggtttttctgccgttcatagctgtcaaggaagatgtcgtaatgcactttcacgcgcgcaatggtcggattgtaaatgggtatgccaccttgggcagtccgttgctgttcgccttcgattattttctttccccactccaccaaagcggcttcgctcaagaggtcgggcactacattcgcttcgggcaacccgtacatatttttatgcgatgttttaatttcatcccgcagtacagccaagttgagtacctgaataaagtgggaaatatacagacgggccgtttttacattagcctgatgtttgcggctggccttcgcctgattgtcataacactgtgtatagtaaatctgcgccgcttcaaacctttgcaggaaattgcgtgcttcgaacaatgttttcaatgaaatagccaaatcacggacactatacaaatcgcccttttcgaccgctgctttcagcgcccgaactctggcttggtctgtatttggtagtcttctatatggcatattattcaagaacttagctacatttcacggtacatcaacagcttcaccaggttctttaattcttttttccgttcctcggctacggcaactgctgccagactttccatagcacttgtgtagtattcacgcattttattttcgcaaacattacgtatattcaactgattatacagtccggtcaccgcttctattttttcggcaggctgacaatcgtccgcattcagccaacggtccaattcttcccgttgcttttcgtccgcgcggttcaaagcttttatcaacatatacgtctttttgttgcaaagaatatctccgcctattttctttccgaacacttccgggtcaccatagacatcaagcaaatcatcctgcaactggaatgcaactcctatctgcataccaaaattatatagattttcagcatcttcggcagtcgctcctgccagaattgcaccaatcttcaaactgccggcaagcaacacggccgttttgagacgtatcatttcgatatattcgtcttccgtgacgttatcacgagactcaaattccatatccagctgttgcccctcacaaatctccaatgtagtcagaccgaataattccatgacctccttcaagtgctccgacggagcagccgtcatcaggcggaatgccagaataagcatggcgtctcccgacagaatagcggtattatcattccatactttatgcacggtcggttttccccggcgcatatctgagcggtccattaaatcatcatgtaacaaagtgtgattatgatatacttcaatggcagcggcagggtcatatatagaagcaacatcctcccgatacaggttatatgccatcaacattaatactggtcgtatccgcttccctcccagtgaaaggatgtattcaatcggttcataaagtcctttcggttcccgggtaaactgaatttcagaaatataattatttatcttatcgagtagttgagaagctgtaaacatgatgaattagaaagattaatgaataaaaagaggctgccgaaagcagcctcttaatttatagtgtatacaaattactgcaatctgaacattacaggaaccgtaaatttaacacgtaccggttttccacgctgcataccaggtttccatttcggcatggtgttaatcacacggagagcttctttatccagatacgggtcaacgctacgtaccactttcgcatctacgatactaccgtctctgttgacaacgaactgtacgattacacgtccttgagttccgttttcctgtgcgatagtaggatatttgatgttcttagccaaatactgcatcaaagctgcttgtccgccagggaagtccggcatgttctctacaacttcaaagatagtctgttcttccggctcttcttcaacaacctgtaccggtacatattttacttctaccggagcagcattatcttcattgataatggttgttgtttcatcaatttcggctttatcgtcgacgatctccagcaattcagccactttcggagcttcaggtggtggtggagcctgttgttcaggagtttcggtaataggaatgatttcctcttcaaacacaaggtcagctactgcctggcttgtatcaatcttcacgtcacgctgggtccattcgaacgccacgaacatgaaagctaatactaccacgtaaccaacgagcaaccatgtagactttctgccttccaggtcggctttgggtgattttttaacttccataaaaataattaatataatgattaataaaaaaagtgtctatctatgtgtctctgggcaaatatagtacattttcagataacccttcttctctcctcctctttttatccgactttttaacttttttaattctttcagacttattccactgcttttataggggaaacgcatggctgattttcaaaataaacgtatctttggcggacaaatcagatgaactgaatatgaaaaagataacaatagcaattgacggcttttcctcttgcgggaaaagtactatggcaaaggatttagcgcgtgaagtggggtatatttacattgacagcggggccatgtatcgcgcggttaccttatacagcatagagaatggtattttcgacggcgacatcatcgatacggagaaactgaaaaaagaaatcgggaatattcatatctctttccgactgaacaaggaaggacgccccgaaacctatctcaacgatgttaatgtggaagataagatacgctcgatgagcgtgtcttccaaggtcagtccgatcagtgcactcgactttgtacgcaaagaaatggtagcccaacagcagtctatgggagctaaaaaaggaattgtaatggacggacgcgatatcggaacaacagttttcccaaatgccgaactgaaaatattcgtgacagctacgccggaaatccgtgcccggcgccgctatgacgaactgaaagcgaaaggacaggaagccagtttcgacgagattctggagaatgtgaaacaacgggattacatcgaccagcaccgtgatgtcagtccgttacgcaaagcggatgacgccttgctgctggataatacgaatctgaccattgcacaacagaaagaatggctgtttgatcaatttaataaagttaccaactagttttcagtaggaagccccttatcactctcaaatcaaattttatgattaaagtagaaatagacgaaggttccggattctgtttcggtgtggtgacggccattcacaaagcagaggaggaactggcaaagggtgaaacgctctattgccttggagatatcgtacacaacagccgggaggtagacaggctgaaaacaatgggactaatcactattaaccgcgaggaattcaagaagttacggaatgccaaggtgttgcttcgcgcacatggggaaccgccggagacttacattattgcccgcgaaaacaatatagaaattattgatgcaacttgcccggtagtgctcaggttacagaaacggatcaaacaggaatttctggaaaacgaacatccggagaaacaaatcgtcatatacggcaaaacgggtcatgccgaagtgttggggctggtaggacagacggacggaaaagcgatcgtcatcgaaaaagcggaagaagcgaaaaaactggatttgagtaagagtatccggcttttttcccagaccacgaagtcattggatgagtttcaggaaattgtagaatacatcaaacagaacatttcgccggaaaccacttttgaatattatgacacgatctgtcgccaggttgccaaccgtatgcccaagctacgggagtttgcagcgtcgcacgatttgatatttttcgtcagtggcaagaaaagttcgaacggaaaaatgctgtttgaagaatgtttgaaggtaaaccccaactctcatctgatagataatgaggaggagattgatccttcgctcattcaaaatgtaacatctatcggggtgtgtggagcaacttctactcccaaatggttaatggagaaaatatacaaacacattcaagcattaatatcttagtttttaatcagaagcaatccgaagaagaagattttagagagcgacaatgtgtcaatattcttacagttttcttgccacaaaagaataaaaagaaagtaagaaagaccaatttgagtatttttaatgttttcttcacatgaaaaagaacttccggaacatcgctttcaactttttattgtacatttgccacgtcaaacaaatatttaagttatgggaacagttaagtgtatcggtattttgacttccggaggtgatgctccggggatgaacgcagctatccgcgcagtgacacgagcagctatttataatggattacaagttaaaggtatatacagaggatacaaaggtctggtaacaggcgaaatcaaagagttcaaaagtcagaatgtaagtaatatcatccaactgggtggaacaattctgaaaacagctcgttgtaaggagtttactactccggaaggccgccagttggcttacgataatatgaaaagagagggcatcgatgccttggttatcatcggtggtgacggttcgctgacaggtgcccgtatctttgcacaggaatttgatgttccgtgtatcggacttccgggaactattgacaacgacctctacggtacagatacgaccatcggatatgataccgcattgaatacgattctggatgcagtggacaaaattcgcgacacagccacttcacatgagcgcctgttcttcgtcgaagtcatgggacgtgatgcaggtttcctcgccttgaacggagcaattgcttcaggagcagaagctgccattattccggaattcagtacggaagtagaccaactggaagaatttatcaagaacggattccgcaaatcaaagaacagcagtatcgtattagtggccgaaagtgaactgaccggaggtgccatgcattatgctgaacgtgtaaagaatgaatatccgcaatacgatgtgcgcgtaactatcttgggacacttgcagcgtggtggtagccctacggctcatgaccgtattctggcaagccgtctgggtgcggcagcgatcgacgcaatcatggaggaccagcgcaacgttatgatcggaatcgaacatgatgaaatcgtttacgtgccgttcagcaaggctatcaagaacgacaagcctattaagagagatcttgtcaatgtattgaaagagctttctatctaactcattcttcttaaaaattcttttttatattagtataagatagagagcggtggacaattggtttttccaattcatccaccgctctttttatcattcaatatccagacttttcgtatggccactttatgctatttttctcgcctcaacggaagataaagaaatagctttctcacgttttctcttattcataagtttttttacccataaataataaccggtcaacggcaatgaggcaccaatcaaagcagcaataaaggtaagaatccgagtcaacattcctccccagttgccaacatgtacagagtaaatccaaccacgaatttttcctgatttatcctgatgttgataaagatttgtttctgtaaattcaccattatcagtgttgaaagaataacggtcagctgcacgctgatttccgaaacggttgaaagagacgctcgccgtaccggaagcaacactgatttgtttatattccggattctggcggcttagcttatcgtaaacttcttgccaatagacgaaaggtgaagtgacagagtgtatataattgtgaccgttttccgaatgttccttattcccttcttttcttccatcacgcaaagccagctcggtatctcccttttgagaaccacctttccgctcctgcccataagcagcccgttgttgcacttccacaccgaacactttatagaaagcggcccgataccacgggaaagaccatgtcagccccgtcaacgacatagctaaaagaaagattaaggaatacattcctcccgctacgtgcagatcataccagaacctcttccaacctttttttgttgatattttcagactgttcttcagtgtcttacgtgtacgtggccaccagatagcaattcctgaaatcagcacaaaaacgaataatagcgtgctgacacccacaatcatctttccccaaaagatcccttcattacccggattcatactatccagcaaccaacggtgcatccgaaacataaacataaaaaagccgctacgctcacttttcccttttacttcacccgtatattggtctacatataatgacgcacgacgtggtttggaaaggttaacctgataagcacgctcggaatcggaagaaatgctgacactagtcacagaaacactgtcgggcaatgtagctgtcaccttttcaagcaactgttcgatagggagtgggacttctcccactgtttccacataataaagttcgtggcggaacaactcattcacctcatcctcgaataccaacatagcaccggaaaaacaaataagggtgattatcaatccgaaagggacagaaagccacaaatgtatcttttcaaatatttttttcataatctatttattactactatttcttgaaaaagcctgcaaagctttccgctcggcaggctttcatctaaaaagaactattttctatttaacaggtatttgttactttgaaggatatttcatcttacctactgtagtgatagcgtcagcctctaccgtcaaacctttcacagccttacccgttttggtatcaattttatagaaagcagggtgttcaccagtagtcacagtaacagccatataagcatagccattttctccataaggctcgccgccaaactttccttcagcaggcaaacccgtaacaggaataatcgtcctatcttctgccttaaaaatagccaactcgctgacatccgcacttgtaccgccatgaatcatatcatccgctccttttttatacaattgaagcaggaagtaatcttcagagatgtgccagcaacggaaaataggatgtttagtgcctatctcttcaaagttcacatagtaatccggatcgaaatccgttgcacccgctttgatacgcattacgcctgagggtttctttcctgtcactttcttcaaatcagaagatgaaactgccgtacgcccatatccgggagagaacacatacacatcgccattatcagcgggccaaatggtctgataatattgtgaacgcatacgaccacatgcataaccgattttatcagtcgtagcaatcacgggtgtcccgttgaagttagtaccactataaattgctacataagcattgtccggatattgtgtggaaggaattacgccagccgtataagcaccactaccactaccgccatcagctttagtgataagttcttggtcggttactttgtccggccatgccttaataccgtacttactcatacccatcggaatgacagaagtataaattttattattagcttctaccaatcctgcccaagtaactttttcaccattacccaagaaattttcggcgatcaatgtgccttcttcttgcgaaccgtcagttgcgtccagataattaaacaacaaagcctgagctacattctgctcatcgtctttctgacttgagtctccggtagaaacagtcaccaccttgtctccccatgttccatacgatgtgatacgattaaaggtatatgtatatttttctttcattttaccatctgctcccaaataataagaagctcccgtaccggcaccacctttattataaactaaagcaaatacataatccaaccctttatatacccaatacgtaccgccaatcacttcggtaccttttccttttgttgatactgttccttcatcaagagaactaactgccaccaaataacttgcttcaccaactgtagcagctactacataggctgtttctccgtcagtcgaagggttatccaccggattatcaacatcatcgcaagatgcaacaaacacaccaccactcaaacaaaaggctgccgcaaacacacacagcaaaaactttttcttcatatattctttattattgatttatactaaaaacttaatcttattatctaccgaaaaacactctgaactttccataaaatgcacgtccagccttttgtaggctgaaattgtcaaacagttgcgcatccgtgaaattctgacattcaaatgatacgttatagcgcccgttcttcattgtataggacaaggataaattatgagaaaactgttccggcaccatgttttttgaatctttatcgccgatattctcccaataaagagggaaatcgtgttgccagtagctatcatagcctatcgtcagtacatttcccttaataaacaggtcattccaatggaaattagcatttatattggcgtaacgataagggagattcggcatacgcaccttgtaatgcatactttcctgcaaagaggtgcctgccaggtacttttcatagtcacgggtatcaatacaattaaatgtaccgcctacatcgaaccagtgcgagaagctataaagcagcgataaattatatcctttagtcctcacatgcccatgattctcatagtatccgtaacttgttccccccaatacatccaatcctctttttatgtaatctttcgtatcccgatatatcaagccggcctcggcatacaccccgtgtttgccaaactgataattatagctgaaactcagattcagattatcacttttctccggcttcagatttactttaccggcttccaagtcttcatcaccaaacagttcgtctgtcgtaggaagccgaaaagccttttcataagaaagttttacctgaaaatctttccataaaaaatatgtacccgcagcaccgtatccgaaagcacttaccgtattggataaatttatataattacctatgccatccgtactctgtgacaccggacctttgttgtattgccggtaatgcttggcaaatgccgaaatattccatttgtccgacggcatcaggcgataagaaagaccgctgacattcttacgtgtaattttaggaatactaaaatccgtaaatttggaagaagcacctatgatagagcggcttgtacgttcaaaatcacttaccacatggctaaaagtaaacgtatgcgcctctccgatatgataattcatcctcagcgttccattccagttcttgtttttagattcactattctgataagactgttctccccggctgcccctttcgtaaaactcaccacgccagttgtaagcccgtgaagcggtatcgacattattagtgaggttatggttataattggcagtcagcagtaaatccaaattcttcacgaataagttctttttgtagtattccaacgaaggggtcaatgaatgtcctttgcggaatttttcaccgaacacgacatcttgataaacaccagtttgtatctctttatagaaataggaataattgaagctcagagccaatctgtccgcccatttttttccaaccacaccgatttttccaatcacagcttcattatggtattggtcattgaaacgtttcagatggtaaatcttacttttgtcgagtggcggaaaacgcacacttccatcttctctgatttcaaagtcacgtacatacgtatctacataataatcattatccgaaaaattctgaaaagcgttcacttcatacataaaaccattcttgaatatttgtccgaaacgtacgtatgacttatgagtgttaaatgaaccgtaagaataagaagcatccagaaaccacttcccgggttgtttgttagtgacaatattaaccactcccccgatagcatccgtaccgaatcctacgggaaccacacctttgtacacctctatgcgatctgcataattaataggaacattattcaaatcgaatgcagcaccggccccttcttgcggtattccgtcaataaagattttcacatgccgcccgctaaaaccgtcaatatacaactgcatatccgatcctactccgcctgactcacggagttttacccccggcaccttagtcagtgcgccggctaaagtctgtgtactgttatgcaacttcttcgcgtcaacggctaccgcattaaaggctgacttatttacccggccaactccggaagttgttactacgacctctcccaactctttcactttcggtgcaatggtgacattgacctgtatcctttctcctttagctaatttaaccttcttttctactgtttgataacctacagccgaaacgacaagtatatattcaccttccacagttttcaagtgataaattcccttttcgttcgtataactgccatagttcgttcctttcagatagaccgtcgcaaaatctacgacctccttttctgtagatatcactctgcccgaaatcatactagtataatgacgctcgtgctgtgaatatgctgatacagaaaataagaatactagaaaaaccaaaaaacatttattaatcatctcctttttactttatacctattcatttactttaaaagcgatgcaaaggtaagtagaaacaggagtgcaaaacaatccctatctattggtaaaaattagacaacaaaaactaaacatatagatatacacaatacctatatataagtaattactagataaattaaataaaaagagaaaaaaatcctactccaaccattgcgccagcaaacgctccgttatttcccacaactgctctttctgtacatggttcacatacttatcggataagcttttccggtgattattgacatagagttgccctgtcacaccggcttcttttttgtccagcaacagaccaattgccgtagaagctcctttcttcggcttacgaataaaaggacggaagaatatatctgtcagagggtcgaaccacttatgcatcgtgatgatatcagtagagacaattcccggatcggcagcattgacggtgattcctttctcccgaagttgctcggatagttcgaaagtaaataataacaaagccaattttgtgttactataaacaggtattctccaaaagtttcccgttttccccctgtgaaagaaatcaggaaaatcaagacggccgattgcatacgtacacgaaaccatatttacaatacgtgctccggatgccatagtcggaactaatttacgagtcagcaggtaaggaccaacataatttacactgaccgtccgttcaaatccatcgttcgtaatagaaaatccggtttccattgtcccggcattattcatcaacaaggaaatggaaagtttacgttccaaaatccgatcagtaaaagaggctacggagtgcatcgaagacagatcaatagcgagtacttccaaattcggatttccggtttctttcattaaacgttggcacacgttttccgctttttgcgggttataacaagccattatgacatgatagccggctgtggccacggcacgggttatctccgttcccatgcctccgtcagctccggtaatgatcgcccatttcacttcattcattgtttttccaatttttcaatctccttttgcagacaaggaggcagttcttcattcaaatgtttatgacaagccatttcgatcgtgtacatacggccaatgcaataattgctatgcccgcaattacaacgtgcacggtcttcacgtgccatacggttcacaaatcccggttcattcagcagggcacgtgccatttgaacagcatcaaagccggcatccagcacttcatcaattttctcacgagaaacaaggccgcctacataaattaacggagcacccggaagggcctcacggaacttcagcgcatcttcgagaaaatatgcctctttgaaaggaacagtcggaatcatccattttccgaacatccgaatgccatatttcagccaccagcaattcatataataagccatagaacggataggcatcgcccctcgcatcacatacatcggcgcacgactgacgaaaccaccgctcaataccagcccgtgagcacccagttcgagcaggcgtcgggctacttgtatcgtttcctccgactccattccacctttgaaaccgtcgcgcatattcattttcacaagaaccgccatatcgctaccggcagctttcatcacttctttcatcactatatccataaaacgcatccggttttccaacgaacctccgtattcatccttccggtgattcgtgtaaggggaaaggaactggctaatcagatatccatgtccggcgtgaacctcaacagcgtcgaaaccagcttctctagccagattgacagcctttccataagcacgcgccatttcaggaagttcttctttcctcattccgcgcacaaaggtcggagagtaaagattgaaaccggaagaagcagagataggagttactccacaaatgttcttgtgggacatattaccgcaatgaccgatttgtatacctgctgcggcaccctcatcgtgtatggcgtcggtcacttcgcgtaaaccgggaattatggaagatcgtaaccataattggcggtcaaaagaaagcccgctttgtgtcacggcagcataagcaaccgtcgtcatgccaaccccgcctgcggctaccgaacggtgataatccaacaacatttgtgaaggggcgtttcccggacacatactttcaaaagctgccgaacgaatggtccggttgcgaagtgtcaaaggtccaaaagtgaccggggtaaataactttgatttcatagtagtatgatatattttgtcaaaagatagccttaatacagaaaagggaatacacgtttcctatttcccacctcatcaccgaattcctcgcggtaacggtgccagattgcgttggcacgcgggacaaggttagcgatcgtccaccaaagaaacacaagtccggaaagtgaacaggtgagtatcgcccagcctgcccactctactatttcgccgaagtaattggcggaagtaacgtagcggtacatccctttttgaggcagatagtggcgggtatctcccggctttcgcaaatgccggatgatataatccgagtgccagttcaccagcataccagtaaaaaaaagcagagttccgagaataaaccatggtgacataaaccaatcaatgccgtacattccttcaggcgcaagatgaaatatccattgtccttgcatatatccgttcaacaaattaaaaagaatgcccattgccataatagctaacggcattttactctttccggtcagcaatagaggaaaaacgaatgcacgctggaaataatgaatctggaagaatatgaagaacatcagtatgacgggatcaaaacggcgttccgaatgcacccacatccaacacataactaaaaatacaggggcctccattaatatccaagccaacttattggaaatagccacaccccacgaagcggtacgaaaaataccatatccggctttcacaaagtaaagggcaataaaaacaatcagagcgatcaggctcattatgcccaaaaacagattaaatgcattcatagtcatacagatattcttttacaatgtgcaaaagtaacaaaaaagaggaaaattgcaacgcaaaactccttaaataaaaactcgatgacacacagaaagttttctctaaaaaacacttatccccaggcatacctccggaaatgatcggaatatacacctggggactacacttatctattcaataaaaggattgtttcctgtcagcgtttctttattgggatataagccagatcatcaagcacgttcttataagccggacggataatacgtttgccttcgaagttcaattcttcattgcggtgggcacaccagcctacgatacgtgccattgcaaacaaaggagtgaagatttcctgcggcaatccgatcatttcatacacaaagcccgaatagaagtcaatgttgctcgatactgtcttgccgttattcttgatgcgtccgaaagtcgcgatcgcccgttcttccaaaagttcgaggaaggcaaactcacgttccttgcctttttcacgtgccagatcacgtgccaattcttttagtaaaagtgcacgcgggtcggaaatcgtgtaaacggcatgaccaataccataaatcaatccggtcttattataaacctctttattcagcatacgagtaaagtaggtgtcaatctcatcaacatttgtccagtccttgatgttctcctgcaaatgatggaacatatcagcaacctgaatatttgcacctccgtgaagcgggcctttcagagaaccgatacctgcggcaatggccgagtaagtatctgttccggtagaagaagtgacacggacagtaaaagtcgagttattaccaccaccgtgttctgcctgaagaatcagaagcaggtcaagagtacgtgcatccagttcggtatagtcttttttcagcatatacaggaagttttcagcgatagagagtttctcctgcggatgtcggatatgcagcgaacgtccgaaagtagcatgacgcagcatattataagcataagcaataatggtagggaattttgaaataaggtcgatactttgacgcatcaggttatcacgagaagtgtcgtccgcatccggatcgaagcgatacatttcgagtacgctgcgtgcaaggatgttcataatgttgttaccttccaactcgatgatattcatcttcgttttctgctccagtgccatattatcattaatcagttcgcagaatgaagctagttcctccttgtccggcagacgaccggaaagtaacaggtacgccacttcctcaaaaccgaaacgtttctctttgatgattgcatgagaaatatcttccacatcataaccgcgatagaacagtttgccgggaatcggtttcagtccgccgcccggaatacgttcgtagcctactacattaccaattctggtcagacctaccagtacacctgtgccatcttcattacgtagcccgcgtttcacgtcgaacttggggaacaatgctgtatcaatccgggtagcttccttcatttcttcggacagcttgtaaatcaggtactctttcttcatattcgtatgtttttaatcattattcttatttttcgattctttccactatttcacgggtgaaatctgtggttgagagagaggttccattcggcataaaacgggcaagatcatgagtggcacgggcttccagaaaactattttcaagagctttttcgataagagcggcagcttccgtccaaccgaaatatccgagcatcatcactgccgaaagaatgatcgaacaaggattcacaacgtttttacctgcaatgttaggagcagtcccatgcgttgcctcaaagatagcatggccggttttataattgatatttgctcccggagcaatgcctatgccacctaccattgcagccaactggtcagaaacataatctccgttcaggttcaaagtggctattaccgaatattcttcgggaatgagcagtgtattttgcaaaaatgcgtcggcaatgcagtcctttatcactagcctaccatccgccaaagcgtcaccaaactcacgttgcgccaactcataaccccactttttgaatcctccttcagtatatttcataatgtttcccttatgtaccaatgtcacggaaggcagatgatgatcgagcgcatattgacatgcagcacgcacaagacgttccgtaccttcgcgtgaaacaggtttcacaccgaaagaagacgtttcgggaaaacggactttcgtcacacccatttcatctttcaaaaacttataaaacttctttgcctccggagtacctgcttcccactcaatacctgcataaatatcttccgtattctcacgaaacacacacatattcaccttctcgggagctttcaccggagactgtactccctgataccaacgaacaggacgaaggcagacatataaatcaagtgtctgtcgcaaagcaacattcaacgaacggattccaccgccaacaggtgtagtcaacggacctttgattcctaccagatattcctgaaatgcctgcatcgtttcttccggaagccacgaacctgtttcattgaaagcacgttctccagccggcacttccagccattcaatatgacgtttacccccataagctttccgaacggctgcatctactataatctgcatagaaggagtcacctcagcccctaccccgtctcctgtaatgtaaggtacggtaggcacatcaggcactaatagcgtactatctttttgtatggttattttgctcatttcttttttctttataaataacagttttaaaaagatttacttcaattttatctcgcattcaaggcggaaccagcacggaaccaacctatctgttgttcgttgtatgtatgttgcacttcaaaactttcttttgttccgtcttcgtggtgaagaacgactgtcagattatgtcccggcataaagtctaccaaaccagtgacggaaagcatatcgtgttcctgaattttatcataatccgccttgtcaacaaaagtaatggcaagcattccttgcttcttcagattcgtttcgtgaatacgggcgaaactcttggctaggatcacacggacattcagaaagcgcggctccattgctgcgtgttcacgactggaaccttctccatagttttcttcagcgactacaatagaagaaatcccttcggacttatacatctttgccgttccggagactgttccataagtatttgtagaacggttccagaccttgttcgtttcgccattgaagacattgacagctcccattaacatattatccgagatattttccaaatgaccacggaaacggagccatggtcccgccatagaaatatggtcggttgtacatttaccctgggcttttatcaacagaggcatattaagcaaatcagtcccgtcccaagcgggaaaaggtgttaaaagttgcaggcgctgtgagtccgacttcaccttgatttccgttttagctccacccggcgcgatatatccgacattacccggcgtaaatcctctcatcgggagttcgtctcccacaggttcggatagtttcactttctcaccgtcatgattgactaatctgtccttcaaagggttgaaacagaggtcgccggcaatagtcagtgccattgtcaattcaggagaagcaacaaaggcataagtattcggattaccatccgcacgcttggcaaagttacggttaaaggaagtcacgattgaatttttccgtgtcgggtcatcggtatgacgtttccactgaccaatgcaaggaccacaggcatttgccataatcgttgcaccgatctgttcaaaagtctcaatcattccgtctctttcggcggtagcgcgaatctgttctgagcccggatttacaatcaacggagaagcaacactcagttttttttccgctacctgttttgccaaagaagcagcacgactcaaatcctgataagaggagttagtacacgaaccaatcagtccgacttccattttacgaggataaccgttcaacaatactttttccgcaaactcggaaataggagtagccgcatccggcgtgaaaggtccattaatataaggttcaagttcggacaggtcgatttcaatgacacggtcgtaatattttaaaggttcatccgtcacaacttcgtcggcacggagatcagcttccacagactctgccaaatcgacaatacgatctcttccggtagctcgtaaataagtcgccatacgcccgtcgaaagggaaaagtgaagtagtagctcctacttccgctcccatattacagatagtagcttttccggtagcggaaagtgattcggttcccggaccgaaatattcaatgattgcattagtacctccctttacggtcaatattcctgccagcttcaaaataacatctttcggagatgtccatccgtttagttttccgatcagacgaacacctataattttcggcattttcaattcccactccatacctgtcattacgtctacggcatctgcaccgcctacaccgatagccaccatacccaaaccaccggcattaggtgtatgtgagtctgttcctaccatcatgccgccaggaaaagcatagttctcgagtactacctggtgaatgatacccgctcccggtttccaaaaaccaatgccataacgggaggatacgtcgcggaggaaatcatacacttcttcgtttgttttagtcgcagtaagtatatcctcttttgcgcccttataggcctgtatcaagtggtcacagtgtacggtagaaggcacagccaccttttccttgcccgcattcataaattggagcaaagccatttgggcagttgcatcctgcatagccacgcggtcaggacgaaagtttacgtagtcttctcccctcttgtagtctttcacatcggcggcatcataaagatgcgcatacagaattttctcggctaacgtcagggggcgtttcaagatcccccgcacatgctctactttccctttataggctctgtaaaatgcttctagcatagtcatatcatataccatattactttttgtttttttagtctatctattaaaataacgaacggcgttcgaggattgtttaacaaaatgaaatattttttctatccaaaaagaagattcgttacctttgcacttattatgaataataattcgaaaagcccggtctccgaccttcagtaccagcaactcctgctacgcatggagtatgaatacgagaaagaggaattcaagcgacaaaccgaaacaatgggtattgcccgtaaagtgaaacgcggtctgtgctggtatcccgtctctcccggtcgaagctactacaattctctgaatcaacttgtaatagatattacacggaccgaaaataaagagatagaacactctttcgagtttggtcgccccgtctgttttttccaccagtctttcgatggaaaagtgaaatatatgaattttattgctaccgtcagttacgcagacgaagaaagaatagtagtggttttacctggtgcaggggcagttatagagttacaagcggacagttcattaggtatacaactttattttgatgaaacatcctaccggacaatgttcgaagcattagaagatgcaatccgcgccaaaggtaaccgcctctcagaactgcgtgatatcttgctgggaacgcaaaatcccggattccgtgaattataccctgtccgttttccatggctgaacagtacacaggagacagccgtcaacaaagtattatgcacgcgtgatgtcgccattgtccacggccctccgggaacaggaaaaacaaccacgctcgtcgaagcgatttatgaaacgctgcaccgggaaccgcaagtacttgtctgcgctcaaagcaacactgctgtagactggataagtgaaaaactggtagaccgtggcgtaccagttctccgcatcggcaaccctacacgagtaaatgataaaatgttatcatttacttacgagcgccgtttcgaaagtcatcccgcctatcccgagctttggggaatccgaaaatcaatccgtgaaacgggcagccggatgcgcaaaggtagttattccgaacgggagggtatgcgcagccgcatgagccgcctccgtgaccgtgctactgaactggaaatacaaattaacaccgaccttttcgacagtgcccgtgtaattgcttcaacattggtcagtagtaaccaccgcctactcaacggccgacgtttccctaccctgtttatagatgaagctgcccaagcactcgaagcagcctgctggattgccattcgcaaagctgaccgagtgattcttgccggagaccactgtcaactccctcctactatcaaatgtatcgaagccgcccgtagcggactggatcacacactaatggagaaagtggtacataagaaaccttctgctgtctcactgctcaaaatgcaataccgaatgcacgaatcaatcatgcgttttccatccgaatggttttaccacggagaattggaagctgcaccggaagtgcgttaccggagcattctcgatttcgacacgcctatgaactggatagatacctctgaaatggattttcacgaggaatttgtaggtgagagtttcggacgcatcaataaacaggaagccaacctgcttctccaggaattggaggcatatatcaaccggatcggaaaagcaagaatattggacgaaaagattgatttcggattgatttcgccttataaagcacaagtacaatatctaaggagtaaaattaaagtaagcagctttctacgtcctttccgtagccttatcacggtcaacacagtagacggctttcaaggacaagaacgggatgttatctttatcagccttgttcgtgcaaacgaggacggacaaataggatttctgaacgacctgaggaggatgaacgtggctatcacccgtgcccgtatgaaactggtcattctcggagatgccgtcacacttaccaagcatcctttttataagagattgatgtcattcataaaaaaagaggattatgagtaatcctctttttatcaaagccccttttctcacgagaaagaacttttttaacacaaacaaaacaaacaatgttttctgtcttatataccctttttatctttcgccacatcagactcaagtcttggaattaaaaattcgagatattctatcaatcggctttttcttaccagcaaaggactgttggtctaacagacacttataaacagatattgggatataggaaatatatatattttacgttcttattccggtatttcatttttatagtagttcttcattattacaacttgttttattttgttgccacaaagataacaacaaacttgcattatttctctataaagacggggatattttgaaaaaaagacggaaagagtgtttcttcccgtctttttacgacatatatattcaatctgattagttattttcagggcgaagtttgcgtactgttacagcagtctgccacatctcgctttcgcgcaatgctttcagttccacttccagtttctcacgataatccggtttagagttggaatcaatagaaatctgtgcttcgttaccagtcttaacactgtgatacaacttttcaactaccggtttgatagcatcgtggaagggccccatccagtcgagggcaccacgttgagcagtagtagagcaattagcgtacatccagtccataccgttctttgcaaacaacggcatcaaggactgagtcagttcttccactgtttcgttgaatgcttcagaaggagtgtgaccgttttcacgtaatacttcgtattgtgccaacagcaaaccttggattgcacccattagcgaaccacgttcacctgtcaaatcggaagtagcttctcgttggaaagttgtttcgaacagataaccagaaccgataccaatgcccaaagcgattgtcttttcataagctttgcccgtagcatcctgatagatagcgtaagaagagttcaggccacgaccttcgagaaacatagtacgcaatgaagttcctgatcctttaggtgcgaccatgattacatcgatatcagcaggaggaactacacctgtacgatcgttccaagtgatagcaaaaccatgagagaaataaagagcttttcctgcagtcagataaggcttgatagtaggccatacagacattactgctgcgtcagacaacagacacattacgatagtacctttctcgcaagcttcttcaatgccgaacaaagtctctcccggaacccagccgtctgctactgctttatcatatgtttttcccggacgttgaccaacgataacattgaaaccgttatcacgcaggttcaatgcctgaccgggaccttgtacaccataaccgattacagcgattgtttcatctttcaatacttcacgagccttttccaaaggaaattcgtcacggattactacattttcaatagtaccgccaaaattcaactgtgccattttcttttttgtttttagttttggggacttacgccacccgttattaattgattttatattctatgttattcaaatatcactttcgaacgacaaacgacttcactaccgtttttcttcacttctacatgaaactcgtttgaattagcctcgtcgcagaaaaaagagagttcatcaccgaaataactttcggctacgtatgccatttcaaagcggcggattcgtttcgtcttgtacaagtcaatcggaaacaaatcgaggatatgctcgatatagcggatactatttacatgaccgttaatgtcaatgtcactgtactttgccgtcagggtagctaccggtcggtcgctcgtcactttgatgcgcgaaggtttttcaatagggcaaggttcgtcacatacgtagtctacgatacttcctccgtgtaaggtcagcaaatctgccggtttgcgggtattgagactaatcattgcccatacggaacgtgcgtatccgatctttttcccatctttatcaataatagcgaaattacggtcagtaaacagacgatagacattttccacccatgtctgaaccgagaagttctcgtattgataaggcatttcgtctaattctacagccaggcgcgagagcacccatgtgtagttatcttcgttcagtgtcgcaataccaaagccacggtcacttgcatgaaaacctgcacaattcagtagatgatttcccaacacccccatagtcaggcgaccgttaaagtctacatggaaaggttccgccacaaactgataagttcctattttattttcttcactcattattcctgcaggtttttactttcgttatattttgcctcccgtccgtcgaggaactcattcacccgttcaaaacaactggtggtaatcgccacacgccccgaacgaacaaactgcaaaacacaattcaatacccggagttcaccgtaaagcgaggttatatcttcactcatcccgttcttctcaacaatggaaaacaccgggtttacttccactatacgagcattgtatcgacggattaacttggacgcttccggattctcctgaaaagcaggagtagacaccttatataatgcgatttcatggaaatatatttcatcttccgtgaagtaatgcgcctgaatcacgtcgattttcttctctatctgtttcactaccttctcaatagtgtccttatctgtccaagctgtgattgtatatttatgcacacctttgatagatgaagcagaaacattcaaactttcgatattgatctgccgacgggtaaatacagccgtcacctgattcagcaatccggcaatattctcagaatgaacaatgattgtatataatgttttatcactcataactttaaattttaaatacgaactctcaacttcccctaacattccaacaacatttgattcaccgaaccgcccggaggagtcatcggcaatacgttgccttcttctattacgcaggcttcaagcaggaacggtccgtccgttgccagcatttcatcgatagccactttcaattcttcacgggaatagacacgtttggaaggaatgtcatatgcggaagctattttcatgtagtccggattcaacatcggagtaaatgaataacggcggttgaagaacatagcctgccactggcgcacgtttccgaggaagttattattcaggcagatgattttcaccggagctttctgttccatgatagttccgagttcctggatattcatttgaagtccgccgtctcccataaacacgcagacggtacgctccggtgcaccgaaagtggctccgatagctgcgggaagtccgaaccccattgttccaagccctccggaagtaataatactgcgttctttcgaatatttaaagtaacgagcagatatcatctggttctgaccgacatccgtcaccaatactgcttcatggtgggttgcctcacttacggcacgtgctacttcgcccatggtcagtgaatccgtagccggataaagttcgggacgaattactttttcttcctccaccttctcatattctttaaaactatcgttccattcggtatgcttgttctcttttagtaatccggttacggcagctaatgtatttttgcaatctcccagaacagcgatatctactttcacgtttttatttacttccgcaggatctatatcaaaatggattacttttgcctgtttggcataagtagccagattacctgtcacgcgatcatcaaaacgcataccgacagcaatcaggacatcacatttgttggtattgatgttcggacctaaattaccatgcattcccagcatacctttattcaaaggatgatcggtaggcaaagcggaaagtccgagcaatgtacatccggcaggcatatcagctttttcaataaaggctctcagttcactttgtgcatttccgagttctaccccctgtcctaccaatacaagcggacgttcggcattatttatcagttcggcggcttccttcacagaatcttcatcggtatcaggcaccggaacataactacgtataaaatccagcttcgccggctcgtattttgtctttgcattctgtgcatctttggcgaagtccaatactaccggaccgggacgaccgctacgggcaatatagaatgcacgtgccaccgcccaagctacatcttctgcacggcgaatctgataactccatttagcgataggctgggtgatacctaccaagtcgacttcctgaaaagcgtctgttccgagaaaacccgtccctacctgtccggcaataactacgataggtgtactgtctatcattgcatcggcaataccggtgattgtattcgttgctccgggaccgcttgtcaccagacaaacacctacctcacccgatacgcgggcaaaaccttgcgctgcatgagcagctccctgttcgtggcgaaccaagatatggttcaatgtattttgatgatcgtacaaagcatcgaataccggcatgatagaacctccgggataaccgaagatagtagtcactccctgatgttccaaggaacgcatcaatgcttccgcacctgttattaagtctttactcattctttatttatattgaagatgaatatcagtcgatgattctcactgctcccttatcggcggaacttaccatgctggcgtatgctttcagactctttggcacgtaacggtcgcgagtgacgggagtcatcgggcgtgcaaccagttcttcatctgttagtcgcacgttaatcgtccgggcgggaatgtcaatttcgataatatctccgtctacaatttttccgatattacctccggcagccgcttcgggagatatatgtccgatactcaatccggaagttccaccactgaaacgtccatcggtaatcaaagcacattctttgccgaggtgacgagattttatataagaggtaggatacaacatttcctgcataccggggccacccttcggaccttcgtgcgtaatgacgacaacatcgccactgacgactcggcccccaaggataccttcacaggctgcttcttgcgaatcaaagactttggcaggtccggtgaatttccagatactttcgtccacacctgctgtttttactacgcaaccatcttgtgctatgtttcctttcaataccgccagtccgccatctttgctataagcgtgttcgaaatcacggatacacccattagtgcggtctgtatccaactctttatagtacataccttgcgaaccgagtacaagattaaatttatttgcagctgcactcgaatatttcctgattgctttttcgctcacattcgggctggtgattgaatattcgtcgatagcttcccccagcgtcattccatctacccggcgaacggaagtatccaccaaaccggctttcgccagttcatccataatagcgatgataccaccggcacggtttacatcctgaatatgatatttctgtgtattcggagctactttgcagagacagggagttttgcgtgaaagcatatctatatcatccattttaaaatcaacttccgcttcgtgagctaccgccaacaggtgaagaactgtattggtggaacctcccattgctatatccaatgtcatagcgttcaggaatgcctgccgggtggcaatgctacggggaagtatactctcgtctccttcttcatagtatttcatagcgttttctacaatcagtttggctgcatctttgaaaagctgtgtacggttttcgtgagtagctacaatagttccgttgcccggcaacgccaaaccgattgcttcattgagacagttcatagagttagcagtaaacatgccggaacaacatccgcaagtaggacaagcattttgttcgatattcgctacttcctgatcgcttacgctttcatcggccgatttaatcatcgcatcaatcagatcgaggtgctgaccgttccattcgccagcttccattggcccgcctgatacgaacacggtaggaatattcagacgcatagccgccattaacatacccggagtgattttatcacagttgctgatacataccattgcatccgccttatgtgcattgaccatatattccacgctgtctgcaatgatgtcacgtgaaggaagtgaataaagcattccgtcatgccccatagcaataccatcatcgatagctattgtattaaactccgcagcgaagcatcccagcttttcaatttccgccttcacctgctgaccgatttcatgtagatgtacatgccccggaacaaactgtgtgaatgaatttacgatcgctataatgggttttcccatctgactcttcttcataccgttggctgcccacaatgcacgggctcccgccatccgacggccttgcgtactaaacgaactgcgtaattgctttttcatttcaatctatcttttaattaaagagcctctctcacatcagtgagaaaggctctaaattctatcttttatggtacgaacacatacaacacaaaacctttctcacgctcttgatgggaccaccacgacgcgaataatatgcaaaactgctaggttaatagatgtatgtaacatattcatatcttcttttctttattttcgtgatgcaaaggtaagggcttttttattatctccaaacaaatcgaagaaaaaaatcactcaaaaactaaaaattgtaagataagagcggcattatttctctattttatcacttaacagttgaatttgcaactattatccaaccgtacacttcttcccgtctttctgacaaaagcacttaataatctgaaatttaccttccccataccggagagcaagcaaataattcgtatctttgcccacctatctttttaggaatttattaatttagaaataaaaatatcaaatggaaacagcagaaaacaagtacattaccgttgcatacaaactatatacaatggaagatggagaaaaagaattgttcgaagaagcaaaagctgaacatccttttcaattcatttcaggcttaggtacaactctcgaagacttcgaaaaccagataacttctcttgccaaaggtgataaattcgattttaccattccggcagataaagcatacggacaatatgacgaacaacacgttatcgaccttccgaaacatatcttcgaaattgacggtaaattcgatagcgaacacatcaaagaaggtaacatcgtacctttgcagactggcgatggccagcgtgtgaacgccagcgtagtggaaatcaaaccggacgttgtagtagttgacctcaatcacccgttggccggtgccgacctgatttttgaaggtgaaatcatcgaaagccgtcctgctactaacgaagaaattcaggaactgattaaattgatgagtggcgaaggctgcggttgcggatgcgacagttgcggtggcggctgtggtgacaatgaatgtggcgacgactgtggctgcgaaggcggccactgccataagtaagaattcaccgccattacccaatggtaaataaataagaaatggagaatgaactcatacagtttcattctccatttttcttttctaatgatctaattttccattcaacatcccttatgcgtcatgatatccaacaccattttatccgtctcattcatggcttgcgaaccgattcttgttagattacggatactctgatctacatcttcgtcgataattccttcaacggaagtcacgcaacggtcttccattgccataattgctgataatacggctgttgaaactcctgtggttactttcagagcgcagcttggcttcgccccgtcacaaatcattcctgtcagattggcaatcatattttggacagcgaaagctacttggttgtagtttcctcccatcagccacgtaatcccgcaactggagccggtggcagctaccacacaaccgcacagggcagaaagacgtcccaaactttgtttgatataaattacggtgaggtgacttaacattaaagcacgaataagttcttcttctgtcttaccattctcctcggcaaagacaacaacgggaagtgtggcggatattccctgattgccactgcctgagttactcattacagggatcattgcacctgccatacgtgcatcacaagcagccgaagtataagaaagaatatgggagaaaacactgtcacccatgactttatgttcataagttccacgcagcatctttccgagggagtgtccgtagttgcctttaaaagcttgttcggctgccgctttattgaggcgggctgtatcgaggataaagcgtatttcatccagaggagctgtcagggcaaaatcataaactttgcgaagattcagttcgggagaggtttcttcttcctcctcggcggtagcctgctgcttgtcgagcagtacattttcgttcatcgctatatatataaaggtagtatgtccgccggaaatcacggctttcgcagttttgtcaccggacttacaaattacttcgatatacagtttttccgtaatatcttcctttaaagaaatacgaattcttttttctgcaataaattgtttaccctgttccaccgcttccggagtacagtctctcaacacctccagttgataagctgaccgaccgatcaatgcacccaaagcaacggcaataggaagtcccaccatgcctgtgccgggaatacctactcccattgcattttttaagatattggcactcaataacacttcaattttttcgggcttcacgcccaatgtctctgctgctttggctacacaaagtgccacagcaataggttccgtacacccaatagccggaattacttctttttttatcagctctataatttgctgtctttcagattcaatcatgcacttctttagttttgttcctacaaaaataggaaattcttttttatcatacattcaataatgaacaaataaatttccatattgttattactcctcgtgagaaccaaactttaactgaaagaataagtagaaaaatgaaagcaaaacacgtgattatctatttgctgctggttattgttacatcttcttgcattcgcgacgaagctcccaatgcagaggcagacattctaagttgccggctaccgggaataacaatgacgactagtcctatcatcaataataattccgtaaccctctttgtcactccgggaacgaatatctccgcccttgcaccggaatttacacttacttcgggagctacgatcacacccgccagtggtacagaacgcaatttcaattcgccgcaggaatatcaagtgacagccgctgacggaatttggaaaaagacttatgccatatcagtcattgatacggaacttgctacaatttacaatttcgaagataccatcagcggaaagaaatactacatatttgtggaaagggaaaatgataaagtcatcatggaatgggccagcggcaacgccggttacgccatgaccggagtagctaaaacagccgacgactaccctactttccaaatagcaaacgggaaaaatggaaaatgcctttcgctcgtgacacgcagtaccggattttttggcggattggtcggaatgcctattgccgccggcaacttgtttatcggttcattcgacgtgaacaatgccatgagcaatcccctgcaagcaacgaagttcggccttcctttccggcacgtgccgacttatctggcaggttactataaatacaaggcgggagaccagttcaccgaaggcggcaaacctgtcgaagggaaacgtgatatatgcgatatatatgctatcatgtacgaaacgagcgtatccgtccccactctcgatgggacgaatgcattcaccagtcctaacctggtttctatggcacgtatcaaagacgccaaggaaacagacgaatggacttactttaaactcccgttcacaacccttccgggaaaattcatcgacaaggaaaaattgacaatgggaaaatataatatatctatcgtatttacatccagtctggaaggagaccacttcaacggagctatcggaagcaccttattaattgatgaagctgaattgatttaccgctcggacttggaccattaaaccataacgactttataccgacaatgaagatgaaaatttatccatacctatttagtttgcttgcctgtatcggaataacgctacccggctattcacaggtcgatagaaacaagacccttatccgttccgcccttcacggactggaatacgaaataaaagcgggattcagtattggcggcacagctccgttccctcttccggtggagattcgctctatcaatggttacaatccgacacttgctatcagtatcggaggagaagtaacaaaatggtttgccgttcagaacaagttaggtgttattgtaggactacggctcgaaaataaggcaatgactaccaacgccaccgtaaagaactacggtatggaaattctgggacagggaggcgaaagaatcagcggcgtatggacaggaggcgtaaaaacaaaagtacacactgccggactcaccattcctctaatggctacttataaactgaacaatcgctggaatataaaagccggtccttatttctcatacatcctttcaagagaattttcgggacatgtatacgacggttatttacgtgaagacaacccgacgggacctaaagtagagtttaccgacaacaaggttgccacttacgacttttcgaacgatttgagacatttccaatggggattacaggcaggtgccggatggagagccttcaaacaccttaatatatatgctgatctcacctggggactgaataatatctttaaaaatgattttcataccatcacttttgcaatgtatccgatttacctcaatatcggattcggatatgcgttttaataaacaagtaacagttattgctgaattacattcccaaaagaatatatcagaagaagaatgcctgaagttactactggatttccgacgaaagcacctatgcatcaaccggactaactattgcagtatcaccggagtaaacaaaacacatgccatactccaattgaactctttcatcgaaaaaggaatgatccatagacatggaagcggaaaagcagtagtatatattcagagataaaattagtcgttaccggattcttccacctgcttcactccggaataagtaacctttacggtctgttgcaatgtagctacttttacattgatattcatagtgagagctccactttccactgttccttctactgtggtggcacaagtgccgagagcggcagcatctcccgaaaaagtcaaattctgttgacctgtgaaagtcgaggcgtcagtctcttttttcaccgtacatttgtctattacaatatcgccgaacttcatgatcgttccgttgagaaacaattcaaattctttcagttccatttttacttccgtatcgctgacctgggaaatggtgataaacttggctatcccattgccaatcactgtttcctgatcggaattatccggcttcattgatatatccagattaccccaataagtgcccactacatcaggagctgtaacaactgcttcttcttcaggaggattattaccacttatatcattatcatcatcactgctacaagctgtaaagagagcgactgaacagattaatgcccataaatacaatagattctttttcatacattgttggtttagttattaaataatcgtcaattataaactaaaaaggagaaaaaaggttcaatttggttcgttttttgaagatattttgagatcgcaacattcttaccgaaaactttgttatatttgcatagagtaattttaaaaaagccacaactatgtttaattcatttggcaatatctttcgactcacaagtttcggtgagtctcatggcaaaggagttggtggagtaattgacggatttccctccggaattactatcgacgaagaatttgtacaacaagagttgaatcgccgccgtccgggacaatctatcctgaccaccccacgtaaggaggctgataaagtcgagttcctttccggcatttttgaaggaaaatcaaccggatgtcccatcggtttcatcgtatggaatgaaaatcaacattccaacgactataataatctgaaaaacgtataccgcccttcacacgccgattacacttacaccgtaaaatacggaatacgcgatcatcgcggcggcgggcgatcatcggcacgcgaaacgatttcgcgtgtggtggccggtgcgctggctaaactggcacttcgtcaattaggagtcagcattaccgcttatacctcacaagtaggcgctatcaagttggaaggcagttattcagattacaacctcgacctgatagaaactaacgacgtgcgttgccctgaccctgacaaagcaaaggaaatggcagaccttatatacaaagtaaaaggcgaaggtgatacaatcggcggtacgctgacctgcgttatcaaaggatgtcctatcggactggggcaacccgttttcggtaagttgcacgctgcactgggcaatgctatgttaagtatcaatgccgccaaagcattcgaatatggcgaaggattcaaaggactgaaaatgaaaggttccgaacagaacgatgttttctacaataacaacggacggattgaaacacataccaaccactccggaggtattcaaggaggactcagcaacggacaggatatctacttccgtgttgtattcaaaccgatagccactctgctaatggaacaggaaacggtcaatatcgatggaatcgacacaacactgaaagcccgtggacgccatgacgcctgcgtactgccccgtgccgtgcctatcgtcgaagcaatggccgctatgactatacttgattattatttgctggacaaagccacccagctttaattattatctttatatgaacgaaattcagaaatacatcgcagcaaacgaacctcaaataatggaggacttgttcagcctcatccgtattcccagtatcagcgccctgcccgaacatcatgacgatatgctggcatgtgccgaacgctgggcacagttattactcgaagcgggagtggatgaagcattggtaatgccctcccaaggcaatccgattgtctttgcacagaagattgtggacccagacgcaaaaaccgtattagtttacgcacactatgacgtgatgcctgccgaaccactcgaattatggaaaagccaaccattcgaaccggaaatacgggacggatatatctgggcacgcggagcagatgatgacaaaggacagtctttcatccaggtgaaggctttcgaatatctccttaaaaacgggttattgaggaataacgtgaagtttatcttcgaaggagaagaagaaatcggttctcccagcctagaggcattctgtgaagaacataaagagttgctgaaagcggacgttatccttgtttcggataccagtatgttgggtgccgaccttccgtcattaaccaccggcctgcgcggactggcttattgggaaatcgaagtaacaggaccgaaccgcgacctgcattccggacacttcggaggtgcggtagccaatcctatcaatgtgctttgccggataatcagtaaggtgacggatacagacggaagaatcactgtccccggattttacgatgacgtggaagaagtaccgcaagctgaacgtgaaatgatagcccatattcctttcgatgaaaagaagtataaggaagcaatcggcgtaaaagaacttttcggagagaaaggatacagtacactggaacgcaatagctgccgtccgtcttttgatgtatgcggcatttggggcgggtatacgggagaaggttcaaagaccgtgctcccttcaaaggcttatgccaaagtatcttgccgactggttccgcatcaggatcatcataagatttcgcaaatgttcactgattacattctcagtattgctccagaaacagttcaagtgaaagtaacaccgatgcacggcggacaaggttatgtctgcccgatttcacttgcagcctatcaggcagccgaaaaaggttttgaaatagctttcgggaaaaagccgttggcagtacgccgtggcggcagcattcctatcatttctacttttgaacaggtactgggagtgaaaaccgtactcatgggattcggtctggaatcagacgctatccattcgccgaatgagaacttctcactggatattttcaggaaaggcattgaagctgtggccgaatttcatcaggaatatgccggacggtaaagtggacacaagaaccattattataaacggtataaacaaaacggcgggcaggcttacaatcaagcatctgtccaccgttttattttatagataacaagaaactactacatgagcggagtctcaaaaaggaacgtaaatgactcactatctttcaaatccttcaccgcatctcctgcataaatctctcccttcgtcaaagacaatttctttataccggctttcgggctaaagtctatctttttcaaatcaagccaaaacaaattcggcgtcaatgtggattcaaaataatagaccttattcttctggtcggagacggaacgccaacgggtagaagaaatatgaggtttctccggagtattaatgccaaatggaactgaaacattacgcatcacactcagcacactgggaacagcaatttttgcatcggcagtctgcggaatggcatgaatgtagaaagaggcacggacaaaacggtcgctcgaacggttcgttcccggcaacatctgcaatccgccgacttctttccagtaatcgttgatagctaactggtattcataccgaggagaatttgtcattacctgatattctttcccttcgtgaatgcttaactttccatccagatattccagcacagccgtattgcctgtttcgtcggtgatggccatgtgcaaagtagattccggtcctccattcggcatacggggagcgtcaatccggaaagtctcctttttcagttcatcaacggcctcacgtacagtggcaaagttatcaagcacgtattgcgtccaaatactgattcccattgccggacggatatcaccgggaagcgaataaatagattcgggcaagaaaagtagactagccaccaagcccttttcattcataccgtcgcaagttcctatatcataaccggttgcaatcacacttccatacttggaagtccagttcaccgttttttccttattatgcccaacacgctgaatgccacgcgggaaaacatagatattcgacataatgtcttctttccagtccattgtacgccccgttatcaccaactgttccgggccgaggtaaacggcacgtgtacacgcctctaccggctgtatactcatcaaagagagagcagccaacatcaatataacccctgtctgtttctttttcatattcttttcaaattaaataattgatactcttatctataataacaaatatataacgattattgccgaaaataaagatgattttaatgaaaataagggatttgtccaaagaagactcccaaagagatattaaataaatttaagactaatgattgcagttattctcatcttctatcgtcaaaaagataaacatagaactatcatggaaagaaaacaaactaagcggattataatattccttcttctattgctgggtattatattacccaatatggcacagaaacaaaagatatggaaagcattttgcgataaatgccggagagaaaaaaccattgtcggtgcgcttccttcgcagttagagaaagctctacgctggtcgcccggcattagtaatgagcaaaaagaagtgatacgttacatattatggaatatggtttacgtagaaggagggacagccaatctcggagaaaacaacgattatcctgtgaatgtggactcttttttcatcaaccgctatgaggtaagtcaggatgaatggtacgtcattatgggggagaatccttccaaccaacacagacgtaactatcccgtagatcaagttaactggtatgacactcaacgattcacccgaaaactctctcagttatccggcctccccttccgtctgccgttcgaagcagaatgggaatatgccgcacgtggaggcttgaatacccaaaactacatttatgccggtagcgatgacccgacacaagtcgcttggtttaaagaaaaatactccaatgaaaacacatatgtatccaacgatataggaaccaaaaaacccaacgaactcggactttatgatatgagcggaaacatctacgaatggtgcatggactggtatgataaaaaagttcctttcaccggaaatattgatcctgacctgaaggggattgatctacataaagtgctacgcggaggaagttattatactatcgccaaatactgcaaaatcaccaaccgttatggagtcaatccactgcgttgggacattgactacggattacggctagtaatatcctttcaggataacacggaggaaaagagagtagcccaataaaaatattctacactaatcatacacataaaaaatcccgtatacgttgttttgaatactcaaactatcacatatacgggatttaaaagaacaagcctttaccttgtttaaactaatcgttcattataaacaagcttaatcgtcagtaggaactttcatgttctcataaacctcaatccatgagttccattcggcaggtgcgtcattggtcgcagcagttttcagtgtacgatatttataggaaagataaaaacgggtgactccgtctacggtgatgtatctgtttgcctgctggacagacaatgcttcatcatcatcagttgtaccgggtaattgtactacctctatcaattctgatttataaggttttagtataagagtattatatttggtaccatcgatataagtcagttcctcctcaccgatttccatgataaggctcgacttgtttattaattcctcttctgctttattggcactgttttcaatgccggcattcaatctcacaccccgtttcgacaagggatatagaatcttattcgctgatatctgtgtaggctttgtatcatcttcccgcagctgagtacccctcataaataatgtcaaaggacttttctgactggtaaaatcattctcaatatacaccttatacaacacccgcgacttatctttattcacttcataaggagtgcaactggcaatccgtaaaggaatcagataagtggaatcgggagacaatccctcggtcctaacttcaataggcaactttacataggggtcctgatcgccaactttcatcaccgcagtataacttttaatcgtatatctggaaggatccagttctttcgcgtacttatcctcatccaagtcaaagttatcatgattatacttatcaatcaagtcaggatctttttccaacgttacggtcacgtcctggtcaatagcccgtgtaccacctgcgtaaatggttatatatccaacggaaaccggagtattcagcgaatgagtgaccggaaacgtcaagtccgtttcactcaacacatacaccaccttcttgtatagctcaccttcaaatattgaattttcattgcacgctgtcaatcccattaacacggcacaatacatcatatattttgttattgatttcattctcatatcaaattttaatttatagttcccgttaattatcccaacccggattctgatccattaatggcactttccgcaattcagcacggggaataggcaagaagaccattttcttatcggccactctggtacgtgcaaaaagatgattgaccgttgttctttggaaaaattcatcttcaaacccgtccgtattcatacctacaatcggttctttttccgtatccaaataaataccccaacgacggacatcataaaaacgtctgttctcgtgaaggaactcaatcatgcgttctctcacaatgatgtcaaacattttatcagcagaacttaactcatcggtagtcaagcccggcaaacccgcccgatagcgaaccatattaaagtatttcgccatttcgttcatatcgcgagtataagtgcccgtgctttcatcgctgaaagtcaccgtatgagatccggtcagattattcaatgcttctacatacgaaagtaatatttccgcataacggataatggggaatgatttaggtaatacggttgcatcggtaccactccaagcatcatcattatggacatatttcttcatcacatacccggtcaccggataattgttggcgtcaccggaacctaccgctttatcctttccggaagccccatagccactcgcacctttccaataatagacatagacatttttcttcacagcttcacttgtagaagcacaaggccagaaacaaccgctaaaaccaatcgatgcatagaagcgcggttcacggtttatatacatattataaacaccgctctttaactggtatccggagaaagacttcacttcagaagtgaatccgtcttccagatatggatattcatcgctcgaattggtacgatctctaccatcaaccatatagtaagcatcaataaacttctgagggacagccattccattatatcctcccattagccccaccggaaaagcgtgccgggtataactacgaagactaccggatgttcttccccatatatattccggattcttagtagcggtcgattcgcccgtaaacatatcgctataagatttatagggatcaatccccacagccccttccgggaaagttttcgtataatagtttacgtctgatacattggtcggcaattccggcgtgtacttgtcactttttacggtatgcaactcatacatatccatatcaattacccgtttggcagcatgcgcagctaccgcccaacgttgctcgtcataagtctggctaacatagggaacattgtccgatttacgtatccaacctccgaaagtcgttttcgctgcacttcctccattgaacaaaggacttgcctgttgcaaccgtaagcgagcaatcagcgcatacgcagctccgcgtgtaggacgcccgaactgagataccgtaacccgcaaaggaatataatttgcagcaatttccaactcgttacagatataatctactgattcatcatacgttgctctttccttattatagtatgcaggagattcattggtattcatcggctcatctcccacaagaacgacaggaccaaagttttgaagcaaattataataagcatagcctctcataaaatgtgcatagcccagaatctcgcgttgttctatatttgtaaggtctttacattcattgattctactgaaaataatattaaccttacgaatgattttatacatctgtgcccagttattcatcgttcccaagttatcgggagtcgtgtgccccaaaacaaatgttactccgggaaattcgcccgtgttccattgcacaaaggcttcatccgaaccggtaacacccggtgtataagcaccaccccagatagcgccctcatcggggaagaaagcagccgtagcccatagatatttctgaagattcattttattctgaaaaatagaatcgtatcccaatgtatcagcaaaatactcatccacattcaagtaattgcaggaggacaggcaaaagtagaacgctgtacatagcgttatcattaatcttttaaaatatttcatatcatgcatatttagaaatggatataggtttgaaatgcgtaacgggcaggaataggataaacacgccccattttctgtgcttgttccggatctactgttttcacaccgctccagactgccagattatatcccaccaattgaaagtcgaatgactgtatacccagtctttttacaaatcccttggtcttcaggttataggttaagctaatttcctgtaaacgtaaatagcgcgcattgtctttccagaaagtagatttcttagtattattttcattcttaccataggataatcgagggaatgctgcattagggttttccgtagagggatctcctgaataccaggctggagtccagcgatttgcctgaacgccggcttccacaggtacattacctgtcttttcaccatggaaaggaacatatcccatttcatatccattaccgactttaaaataggttgtatttcccgttcctttgaacagacaagccagtgtaaacgatttgtaacggaactctccgccgaatccatacatcaataacggatagttagagtaggccaacggcacttggtcgtcttccgttatacgtccatcaccattcacatctttatatttaatatcacccggacggacagttccaaactgcgacggactgctctccacatcttggtcatctctgaacaatcccaatgctatgtaaccacgttgcactccatacggcataccgcttatctgctgatagggatattttggatcagcctgttcccagttctgcacatcattcttcgaataggtaaagtttcctctgatcgtaaatgagaagtctttgcctatatcctgcgaataagaaatatttccgtcagctccgtagctacgcatctttcccacattaccataaggcatggtgataatacccgcgaaatcaggaacctgagttctctgctggaaaataccatttcgctggtcattgaaataatcgaccactaaggagagtttttctttgaagaatttcgcttcaatacccacatccgctttggttgatttctcccaagccagattgtcagcacctacgatagactcgttcacaccattggaatcgcttccccagcccgtagccgcattagaattaataatagtcagataagggaagcgtttattggaaatacggtcgttacctacttgtccatacgagaaacggattttaagaaaatccagccaaggcaccgctttccgcatgaaatcatagtttgtcggcacccaaccgatagctcccgaaggaaagaaaccgaattgcttacccggctcgaagttttcggaacctgtataaccgaagtttgcatcaatgaaataggtatctttaaaactataagtaattcttccggatactccctgataacgtttgggaatagcgctcatactgtcagtgatgtctttagtcgccttctcgtcactcatgtaatagtaaagcaaggctgttgtcctgtgtttatcattgaataacctttcgtaattggcagtaaactcgaaatgatatttacgccaatgattcaatgtcttactgaatgtagctgcttgagcgtcaactttctttgccaattgaagttctccggaagtcgttcgcccgatagccgaatacatctccggcattacaaaacgagtctcatcataatatacgtcgctattcaacgcgccctgtacttttactttcaatcctttcagaagaaatgacaaatcctggttcagagcgagagtcaccatatttttgtaagtctcgcgggtagccattcccgtatgattaagcattacataaggtgaataggcatcattgacaccataagccggaagttgtcctgttgaaaacctagtaggaatagtcaacggtgtcaacattgactgagcattccaaagtaaatctgtgttagccattcccggctcttttttattggatataaatccgtccaaccccaaatagagggtggttgacttagtaacattgatatccaaattggttcgataattatatgtgttgtatcctgtgtctgccttgtaacggctgtcagggtcttgaatatatgctgccgactctttcgacatacccatactcacaaaataacgggcaatactaccacctccctgtgcacttacataataagtctgctggaaagaagtcttatgcagaatttcgtcttgccagtttacatccggatacaaatccgggtccaattgatattggattaaatccatttccataggagaatagagttctttctctcctgaaacgactctggcttcattggccagcttggcgtaatcataagctctcaaatatttaggtaaccgcttcaactgtgaaatagtaaaattggcacgggctgtaattttgagtttttctactgttccccgcttggtcgttacaagaattactccgttagcaccacgaacaccgtaaaccgccgttgcagaagcatcttttaaaacagaaaagctctctacgtcagcaggatcaacctgactcaaatcgccttccaaaccgtcaatcaacaccaaagccgaactattagcaccaaatgttcctataccgcgaacccaaaattccgagatatttttacccggttcaccactcgactggatagagataactcccggcactctacctcccaaagagttattcagtgaagtggccggaacagcaaggtcaccaatatccacgcttgtgatagctcctactacgctcactttacgctgggttcccatacccaccactactacttcgtccaaagcagtagcagaaggagtcattttaagaaccaggtttgtctggctatcggtaacgaaatactctatcttatcatatccgatataattaacgatcagtacatcgcctttatgtgcctgaactttaaatctaccatccaaatcggtcgttgtacctacgcccggacggtctttcaagaatatattagcgccgataatcggttccttatcggacgacttatcgacaactatacccgaaatagtcagcgatttccccgctttttgagccatgacgcccaaacagcataaaagtaaaatttgaataatatataattttctcatgttgaattagtgataaacaggttactgaatagcaagttttctaatacacttatttttagtatctgcaatgtaaattgtaccttcttcatccacagctactccccaaggctcatcaaataaagcgtcatccggcgtaccgtctacatagccggctctgcccgggacaccaattacagtacttactgctccttcccggtcaatcgaacgaatacaatgattactggaatctgcaatatacatgattccgtctaagtcgaaacatatctgtgaagggaaattaaatcgtgcgttcaaacgttttccgtcctcatagccaggatcttctcttgctcctgcatacaattcataatttccggtagaaagttcatagcgataaatacaatgcttgctccgataacaaatatagagcacatccggatcgagactatcaaaacaacagatagcatcataagtccaacccgcatccagccccgtagtaactagttctgcttccttactcttaggatccattttagccaagtttccatttaatgcctttatatacaccagtttatcttccggattaacagcagcggatatatattggtctaatgttacattctgtggcttcacctgttttttagcccattgtgtttccggatcaaattgtaacaaattacctccttgtacccaaagcggtaaaaagactttctgcccttctgtttcaaccattggaataaatggagctgtaatatttgtagctaatgtagttaccatattttgttgctcatttatctggcgtaaacgataactggacctttcgcaaacaaatatatttttctcacgatctacgcaaacaaaatgagtcaatccgaactgagctgccgccaatgttccgtcaactgcatttacttccgttcgcggcgttcccgtaatcgtacttacagtaacctgtgtcttatacgaaaactgctgttcaaaactggctttatctttacctacttctactgtaatagtgcaattatctcccggttgccgaggagtaatgacataaattttagttcctatggaacgtaccactgccgcttgtttttcattgtagaatacttttatctgcgaaagatcagttccgaaattttctccattaataataactttcgttgccattcccccattttcagggtaaaaagaggttagtttaatcggttgatttggatcataaggtttgcctgttgtgccaccttcttctgaatcacttttacatgctgaaagaaaggttatcagcattgcaaataaaatagttaccaaagatgtttttctcattactattatttcatttcattagtgtcccgttaaaatgggacgagttaaacaattaatcaaaaagccccggaatcaggggatcatttagatctttgacatcattgaaattagtcttgtcgaacaggtcacgcaagtgggttttgtcagtcaatgatatgctgagaatttgcaaaacttcataggttgaacgtttcaacttcatatcatgttggacaatagccacaagacagtacgtgataatagccacactgatttgtatgcgaacagcgttctctgttgtgccccagaatttctttatcttgagatgctgcttgagccatttgaagaacagctcgattaaccatcttttcttataaagattggcgacatccagtgcagaaagttgttttgcattcgtcaagaaagtgaactcacggtcatcctcttcgtcgtaatatcggacgagtctgaatgactcaggatattttttctcggagagatatccggtcagtttcacttccgcatctgtcattatgttctttggcattcttcgcttccatttgactgtcttatactttaagtttgtcttggctctgacaacaaagaaagagtctgtaagatgtatcctatagagttctttaaaggagtcataagccctgtcgaatatataataagcatttggttcataatggattgaagacattgctgtggaatcatgctttgaagcagtggttacggtatagaaagcaggaacttgtgcttcaatgtcgtataagacatgagctttcacccctcctttcttgcttcggaactttgcccatgggaatgttgcaagacacaacggaatcgttgttgaatcaaacgcatatttctttccggaaatgtcaaggatgttggtcgtccgcttctcgcaggcttccttcatcatatagaatgcaaagtcttcgaagattctgtaatcacggttctggttggctgtcgcaagagttgttttggctatcggttcacgacctaaaccaagatgatattgcttggccctatgcgcctcgaaagcaacgattaagtctcgcaggctttcacggttactcagttgtccaaacatcatcgcgagcatctgattccagcaagtgaaatgtttcacatatctgttgccatcatacttgcgaacatagttgttgaactgagtcctgttcagaaaagcggttaattgagagaatacgtatttgtcttggaacatagcagccatttgtattagactgcaaagttgcaaaatcaagtccgtttcattttaaaaaaccgcgtaattgactatatttcaataatttcaaagaactaattatccacttttacgggacagtagtgatttcatttattaaattaatgatcctatttaatagtttatcagttttttatcctatgaaaggaagatcaaataaacttttaaaccaagatcaaaggttaacgattaatcgaaatccatcagttttttggggacctgactggaatcaattttagagaataagcctgttaacactcctttgaagtatcaacatgtttgcctttgtttttgaattttcatttccaaaattcataattcataagataagcggaggttttcttttcataagcatttcttgatttagttaataaaaaattagtcgaatatcctttgcttgttactaagttctacttgaacttaggtaaaaggtaataaataataaaaaataagtaccttaaatattatttggatgtttaaatgtactttctctgtatttatttttatatagccttcttgtgtcttgtgcaaatatttaatattctcgaatgcaaatatacaatattttattatataacaacactactgtcccgtaaaagtggataattagttctttgaaattattgaaatatagtcaattacgcggttttttaaaatgaaacggacttgattttgcaactttgcagtctaatacaaatggctgctatgttccaagacaaatacgtattctctcaattaaccgcttttctgaacaggactcagttcaacaactatgttcgcaagtatgatggcaacagatatgtgaaacatttcacttgctggaatcagatgctcgcgatgatgtttggacaactgagtaaccgtgaaagcctgcgagacttaatcgttgctttcgaggcgcatagggccaagcaatatcatcttggtttaggtcgtgaaccgatagccaaaacaactcttgcgacagccaaccagaaccgtgattacagaatcttcgaagactttgcattctatatgatgaaggaagcctgcgagaagcggacgaccaacatccttgacatttccggaaagaaatatgcgtttgattcaacaacgattccgttgtgtcttgcaacattcccatgggcaaagttccgaagcaagaaaggaggggtgaaagctcatgtcttatacgacattgaagcacaagttcctgctttctataccgtaaccactgcttcaaagcatgattccacagcaatgtcttcaatccattatgaaccaaatgcttattatatattcgacagggcttatgactcctttaaagaactctataggatacatcttacagactctttctttgttgtcagagccaagacaaacttaaagtataagacagtcaaatggaagcgaagaatgccaaagaacataatgacagatgcggaagtgaaactgaccggatatctctccgagaaaaaatatcctgagtcattcagactcgtccgatattacgacgaagaggatgaccgtgagttcactttcttgacgaatgcaaaacaactttctgcactggatgtcgccaatctttataagaaaagatggttaatcgagctgttcttcaaatggctcaagcagcatctcaagataaagaaattctggggcacaacagagaacgctgttcgcatacaaatcagtgtggctattatcacgtactgtcttgtggctattgtccaacatgatatgaagttgaaacgttcaacctatgaagttttgcaaattctcagcatatcattgactgacaaaacccacttgcgtgacctgttcgacaagactaatttcaatgatgtcaaagatctaaatgatcccctgattccggggctttttgattaattgtttaactcgtcccattttaacgggacactaatgatataacaatatataataaattgttttattattattttttttcttttgtgaactttgccagtgattttcatgcctaaaatagtccatgactatatttcgatctaatatatctaccgtattattcaagtgagagtagcacagggctttctttttcagtttataacctaagttcaagtagaacttaggcattttttagcatttgattcagtgtactcgatcaaagtttcatagaatcgcgttatctttttgaataccaacaatatacattacgcgaacgtcttaatcttaataattacaaatatcagaaattagttacattttccctaaatgcttccactattatgaaaaaaagttctcactgtagtgagaacttttttccttatcgcgacatttttttcttattatgatgaaatttacaacaacacactataatttagtaatagtattggctacaactgaaactcgtcttttacttaaaccttataagactaaaactattcaaatgtttttcggtatgtacatccatttttccattccgaacacccgtaggctgtttttccttttatgataattcccttaccacaaaccggacaggattgtcctactaatgagtccggagtattattcagagaagaaataggggtagcaacaggagacggtgatacttctgtttttgactcttttgattctcctgcttcggaattcttttttttctctttcggcggcgtacttactttccgttcacgttttttaggttccttctttgccttctcttcggtcttggcagctaccgcatcttgaatagtgatacgacgattggtattatcagaaagtacactcattacaatttccgaaaccatttgtttcagttcttcaagaaattggcgagcatcgtatgttttcttttctatctcacgcaacttcttttcccaaatacccgtcaactccgctgatttcaaaagttcttcgtggattagctgcaccaattctactcctgtcggtgtagcgatcagattctttctctccttgcggatataatttcgtttgaacagcgtttcaataatagcggcacgggtagatgggcgaccgataccattctctttcaaggcatcgcgaagttcatcattatcgactagttttccggcggtttccatagcccggagcaaggtcgcttccgtaaaaggtcttggcggctgcgtccatttttcattcaagtcggggatgtgaggaccactctccccttttgcaaaggcaggaaggacattttcatcgtcatcgtccttttcttcagtagtgtctttcacatctttagcgaataccacacgccagcctggttctaagatttgcttaccggtgactttaaattctattttatccacttcacccatcacggtagtagtcgaaatcttacaatcaggatagaacactgctataaaacggcgcgctattaagtcatagacacgacgttccatatcagtaaggttttgagcataaactccggtagggataatggcgtggtggtccgtcactttcgaattatcaaataccttttttgatttaggcaacgtagaaccattcaacggggcagtcaatacttcgtaatcacgaagccctttcagaataccaggacatttcggataaatatcgtcgctcagaaaagtggtatcaacacgtggatatgtagcaactttcttctcataaagagattggatcagtttcagtgtttcatcggcagaataggcgaatttcttgttacactctacctgaagggaagtcaagtcaaacaaacgcggagcatattcctttccgtctttcttaccaacactggttaccacaaaaggaaggtctttgatacgttgtaccaaggcttcaccttcttcacgattggcgataggatcgatacccggattgtctattttcttttttccaccgtttttttcttcttctgccgctatttcttcatcacttttgcggataagtgcggagaaagtagtatctcgatagtttgtttttagttcccaatattgcttgggttggaaattggcaatttccaactgacggttgacaatcaatgccaaagtaggtgtctgcacacgtccgatagaaagcacctgtttgttttgaccatatttaatagtatataagcgtgtggcattcattcccagcagccagtcacctattgcacgagaaagtcccgcctcatacaacgattggaaatcagactgatcttttaacttggaaaaaccttcacgaatagcctcttccgtcaaagaagaaatccacaaacgcctcaccggacagcgtgcacccgccttttgcatcacccagcgctgaatcaattctccttcctgaccggcatcaccgcaattgataatctcatctgcattctgcatcaactgttcgataatatgaaactgtttctcaatacccgggtcatgtccaatcagtttgataccgaaacgtggggggatcatcggcaagctacccaagctccacgatttccaattgggtgtatattcatgcggttctttcaaggtacagagatgcccgaatgtccaggtcacctggtatccgttcccttctatatatccctctttccttgtatgagcgccgagtacctcggctatatcgcgtgcaacagatggcttttcggctatgcaaactatcattctttctcctcttgtttttatactatcagtctacaaagttacatgattatttctcactgaccgcatgaagataaaaaaagtctatcataagaaaaaagtgattgcctctattataaaagacaatcacttcgttaacgttctaatctagatatatcaactacaattattcttcatccataagaatttccagaatttgacaagcagctttcgctaccggagtacccggaccgaaaatagcggccacacctgccttatacaagaagtcataatcctgtgcagggataacgccaccggcaatcactacaatgtcttcacgtcccagtttcttcaactcttcgataatctgcggaaccaatgtcttgtgtccggcagccagtgaagaaacacctactacatgaacatcgttttctaccgcttcgcgagctgcttccgcaggagtctggaacagaggtcccatatccacgtcgaaaccacagtccgcataacctgttgctaccactttagcaccacggtcgtgaccgtcctgtcccattttggcaaccataatacgaggttgacgcccctctttcttcgcaaacttctcagccagttcacaagcacgcttgaagtcgctgtcgtttttactttctgatgaatacacgcctgatatagttctaattattgctttataacgtcctactatctgttcgcaagcaaatgagatttcacccaatgtcgcacgaacacgagccgcttccacagccagttccagcaagttacccttaccggtcttcacacattcggtaattgcagccaatgccttgtccacttcagcctggttgcgtccttctttcaaacgtttcaggttttcaatctgttcaagacgaacggcagtattatcaatttcaagaatatcaatcggagcttctttatccagacggtacttgttcacacccacaatagtctgctgaccactgtcgatacgagcctgtgtacgtgcggcagcttcttcgatacgcatcttcggaatgccggtttcgatagctttcgccataccacccagtttttcgatttcctgaatgtgctcccaagccttatgagccaattcgttcgtcaaagactctacataataagaaccgccccacgggtcaacattcttacaaatgtaagtttcttcctgaatataaatctgagtattacgtgcaatacgtgcggagaaatctgtcggaagagcgatagcctcatccaatgcattggtatgcagagactgagtatgtcccaaagcggcagccatagcttcgatacaagtacgtcccacgttgttgaacgggtcttgttcggtcagtgaccaaccggaagtctgtgagtgagtacgcaatgccagtgatttcgggttcttcggattgaactgtttcacaatcttcgcccacaacatacgtgcggcacgcatcttggcaatttccataaagtggtttgtaccgattgcccagaagaaagacagacgcggagcaaacgcatcaatgtcgatgcctgcggcagttccggcacgaagatattccaaaccgtcagccaatgtataagccaactcgatatccgccgtagcacctgcttcctgcatgtggtaaccggagatagagatagaattgaatttcggcatcttctgtgaagtatattcgaagatatcggaaataatcttcatagagaatgcaggcggataaatataggtgttacgcaccataaactctttcagaatatcgttttggattgtacctgccatttcttccagtttggcaccttgttccagtccggcattgatatagaatgccataataggaagtaccgcaccgttcattgtcatagacacggacatcttgttcaaaggaatgccatcgaacaggactttcatgttctctaaggaacagatagacacacctgccttacctacgtcgcccacaacacgttcgtggtcggggtcataaccgcgatgagtagccaagtcgaatgctaccgacagacctttctgaccggaagccaagttacggcgatagaaagcatttgattcttcagcagtggagaatccggcatactggcggatagtccaaggacgaagcgtgtacattactgaatacggaccacgcagatagggcggaagtccggcagcatagccgaggtgttccattccttcgaggtcttcttttgtataaacaggcttcacttcaatgtgttccggcgttttccagtcagcggagataccgttagccttttgccattcagcaccgttagcaggctgaaatgcggcatatatatctaagtttttaaaatcttttctcatcttacttcaatagtttggcgttaaactctttcaaggtatccagtacgttgacacggacatggatgaagttttcgatacctgctgctttcagttcgtccatacaagcaggagcaccggcaacgataaacatagcgcggccgtccaatgccttgaatgcaggaattgcatattccgcatattcatcatcacttgaacagattacgacaatatcagctttggcagccatagctgcttctactccagcttctaccgtttcaaatccgagattatcaaccacttcataaccggcacaagccaggaagttgcaagaatactgtgcacgtgcctgacgcatagccagattaccgatagtcagcatgaatgctttcggacgtttgccggatgcttccgtttcgagacgcaatgcttcaaactcgctggcagcacggtcgaataccaatgtatccacatctttctcacaagtatggtcttttccaccacagcagcattttgcttcaaccggttgcttatctccggccttttcattgaagttcgggaattggttagtacccagcaatacttcacgacgttgggccaccgctttatgacgggctttattactttcgttgacagcagcctgaacagtccccgccttcaatgctacatagaaaccaccggcttcttctacagacaggaacaagttccatgcttgctgtgcaatagaaattgtcaggttttcaatataataagagccggcagccgggtcaattactttatcgaaatgagattcttccttcaacaatagttgttgattgcgtgccagacgttcggagaattcatctggagtctcgtatgtcttgtcaaacggagtcactgtcatagaatccacaccacctaatgcagcgctcatcgcttcagtttgtgtacggagcaggttcacgtgtgcatcaaacaaagtcagattgaaagtggaagtttcggcatgaaccgccatttttgccgcgcaacgacattcaccgttagcacctttgttatcacagtcgcgcaaacattccggattgtaagaagctacaatattcgcccacaacagacgtgctgcacggaatttagcaatttcaaggaaatagttggaactgataccgaagttgaatttgatttttttagccactatagcagcaggaacaccggcatcggtcaattggctcatgtattcattaccccaagccagtgcataccccaattcctgagaaatataagctccggcattgttcagcgataatgcgttcacattcagtacgcggtagaaaggaagcggttggatagcttcaatcagtgctttagcagtttgcaccatatcacccttttccttgccgcgggtcagcattttgttgaagaaatcatagttgatagagcctttcagcttcttcacatcataatccttcttccggaaataagctaccagcagattagccagttcaacaacgtgtccctgacaagtagagaagttcagttcaacacactcagcttgaatatcattcaacagagtctcaagatattccgcattgagttcttttgcctttacatggaaagaaagtgaatcgacacctttattcaggatatccagtgctttcgcattggcctctttaggacattccactttgatttcctgacgtaccagccattcattgttgtccttcttggttcctcttaaataagggaattctccgggaagtgcgtctgtcgtcttcaacccttccaagtcctccatccggtagaaaggtttcactttgaatccttcgttcgttttccaaacgagcttcttctcaaaatcagcacctttcaagtcggctgtaaccttctccatccattgttcggtggagacaggagaaaagtctgagaagagtttttcttttttgtctgccatagtttatctaaaattaaaacaagaattaatattgtctctatttttatctgtctctttccaaatgtctgttgttcgacttgcaaatataattaataagttcaaacgaaacttctttttatagaaaattcgcacacctccactttgtatagaatctgtatggaaattcttctttcccgcaatttttagttcttcttttatttgattagctccaatgttatgactaattttgcacccgtttttagaaaagacattataaaaactactaaattatggattggttacaaagtttattgtgggaccccagttccgtggcacacatcgtgttcctctacgcattcgtagtggcagccggcgtgtatctcggtaagataaagatattcggtgtatctttgggcgtcacatttgttttgtttgccggcatcctaatgggacatttcggcttcacggccgatacacacatcctacatttcatccgtgagttcggattgattttgttcgtattctgtatcggtcttcaggtggggccgtctttcttctcttctttcaaaaaggggggaatgacattgaacctgttggctgtaggcatcgtagtgttaaatattgctgttgcattggggctctattacctttggaacggtcgtgttgaattgccgatgatggtaggtattctctacggagctgtaacgaacactccgggacttggtgctgccaacgaagcactgaaccagttgagctacaacggcccgcagatcgcattgggttatgcctgtgcttatccgctcggcgtagtaggtattatcggttctatcatcgctatccgctacatcttccgtgtcaatatggcaaaagaagaagaaagcctgaaaatgcagagcggagatgcacaccataagccgcatatgttgagccttgaggtacgcaacgagtctatcagtggaaagacactgattgagattaaagaatttctaggacgtcagttcgtttgctcccgcattcgtcacgaaggacacgtaagcattccgaaccatgagactattttcaatgtaggcgaccagctatttatcgtctgctctgaagaagatgcacccgccattaccgtattcatcggtaaggaagtagatatagactgggagaaacaagatctcccaatggtatcccgccgtatcctggtcaccaaaccggaaatcaacggaaagacgctgggttctatgcacttccgtagtatgtacgatgtcaatgtaacccgtgtcaatcgttccggtatggacttgtttgctgatcccaacctgatactgcaagtaggcgaccgtgttatggtagtaggccagcaggatgcagtagagcgtgtagcaggtgtcttaggtaatcaattgaagcgcttggatactccgaatatcgtaactattttcgtaggtattttcctgggtatccttttgggtagtcttcctatcgcattccccggtatgccgacaccattgaaacttggtctggcaggtggtccgctggtagttgcaatccttatcggacgcttcggtcataaactccacctggtgacttataccaccatgagcgccaacctgatgcttcgtgaaatcggtattgtgctgttccttgccagtgtgggtatagatgccggcgccaacttcgtacaaacggttgtcgagggtgatggattactttatgtaggttgtggtttcttaattaccgtcattccgttactcattatcggtgctatcgccagactatattataaagtaaactactttaccctcatgggattgattgccggtagtaataccgaccctcccgcattggcgtacgccaatcagacaacatccggagatgctccggcagtaggttactctactgtttatccattatctatgttcctccgcattctgacgggacaaatgatattactggcaatgatgtaaatcaagcttagcttatataaatgataaagccggccaactccataagaggaatagccggctttattttatttactacccagtcagtttctccgaatcaaaaccttaattgtaacttcttagccacaaattcttctacaaaccgtactgtttcttcaatccctaaagaagacgaatcaatacacagatgataagtagctgccgctccccatgtcttataactataataattataatattccgaacgtcttttatcggctttctctatcatctcttccgccacttcttcattcacattatgaatccggcaaagacgtatgatacggtcttctttggaagccgagataaaaacattggcacaacggggatgttcccttaaaatatagtcagcacagcgccctacaaacacacaggatttttctgccgccaaacgacggataacgtcactctgtaccttgaacagtgcatcattactcaaacaattgttacaaggcatggctccctcactgataaaggggaaacgcataccaaataatccgccgataattccctgcgaagctttctcgtccgccttctcaaaaaactctttgcataatccgctctcctcagatgccagattaatcagttctttatcgtaaaagtcaatgcccagacgagcagccagtttctctcctatttcttttccgccgctacctagttggcgaccgatattaatgacataattaccgttcatagtaaacttaattttatggttgtgtagcaaacatacgacttttttctaaaactcacatcatcaaacgaaagttatatttaaaagtgacgatgaaatatccctttatttcctgcgtacgatactcataaaagccatcagaagtagccatacgcccataactttttttctttcccagaatatccgcccaataagccgacaattccgcttccttcttcttcaggaaacgccatgtagcaccggcattccacaatatttcatcatcttcccctttctgaatattcgttccgctacgaagattatacgtagcatccgtgcgcaactgcaacccgaaaggaaaatcaacataaccattcagaccgaaattataataacgcgtataggtatcattatcgttcaaagaattaagcgagtattggtaattccaggaagtagataagtcaatgcctccccaagaaggttgataagacgcctgtgcctcacaattcaatccggtatcacgggttgtactcttttccggctgtaagcttttatcttcattaatcatacctacacggttactatgattaccggacatatccaatcttaaagagaaatgtccaaaacgtttccaccagctagcccctgcggacaaattccaattaccgtttatattgaccggatacgtttcgcgtccaccggtctgcacgtcatatatcatgacttgtgtaacactgttttgctccacctgtccgcctaggtttgcagatatacctttaggtgagttctgaaaattcagacgtatattatgactaaacatctgcttcaagtcaggatttccacgggtgatatacagcggattgctattatccgtcaacggcatcaaatccgacaaagaaggctgccgggtattaccgttataattcaggctgacacgcatctctttcttccgccaactcatccatatcataggttggaaatcaatcatattcatggcagtatccgcataaagtttccctactttccggtcaatggtacgcctttgcggcgtaacccccagtgatgcgttaaacatccatgtgtcatccgaatagttgactcctacattcaggtcgtgcccattactgcggctgtggctacggttgctcaaactatctacataccccgcctcgtaaccggaaggtaactcaccgtaaatatccgaactcgccaaggaagacaattcataagtatcgcggttactccgttcataccgggtactccagttatatgccacccgcagacgtaccttctttccgacaggttgagtaaacgaaagtcccaccctccaggaattattgcgctggggtgacttcaaatactggttacgataaagtaccgagtcattcccattcttatccttcaagcgaaaataggtagtctcggaaagagagaaactttcattatttccccacgaatcggaattctgaatattcagtcccagagttgttcctttttcgttcaggcgtctcatcactcccattgcccaatggtagcggtgggattcattttccgaccgtgaccgattctcactacggttcacctttatatcccggggaacagactcaaaatcactgaacaagttctcatggtttacgccgggaggagcgtcaaaagaagcactctgactgttactttcattttgattaggagtatacccgaaatttccactgaagttgacacgcgtgcttttatctactttccactctcctatcaagctggaattgaccgaccgtcctttagagtttccttcgttggcagaggccgaatattggttgccaccagtcaaatactgctcctgatacatagaagatatattcccgttcctgttaagattataattcacatggccattcaaagaaaactttccgccaaatttatgtgccatattcaatcccagcgaattattgatattatctttgtatgtactgttctgatatctattagtagaacgggctataaaagacaggttttccccattcttacggaaataattcacttgtgcctccagatccttcttcttattattgccataccctaccgtcgcatttgtcagccaagtcttattcagttcatccttggtttgcaagtcaagcacatatttcttttctcccgaactgattcccgtaaattcttcctcttttgatttcttgtcgtacacctttaacttgctaatcaagtttgccggcagattctcaagcgcggtctttttatctcctgaaaagaaagactccccatttacattaatttcgctgataggctgaccgttgtaagtcaatgaatggtcttttttgttatacaccagtccgggaatacgtttcaccaagtcttccagataagctccttcgggagttttgtaggcagaagcattgataacagttgtatctccttccataaccacttccctcaattttccggtcactaccacctcatcaatctgaaggtcatcatccttcagtacgatagtgcccgcatttatagatacggaatctcccaatgcacggtagaaagactgcattcccataaatgaaaccttcaacagatattctttctttttctgtggctgataagttagagtaaatcgaccgtttttgtcacttgccgtaccttttacaaaagcagagtccatcttttccaagacgacaatactggcagaaggcaaagattgtttcctttcacttccggtttccagcatttgtacccttcccctgacagtcctcacctgttgcgcatacactattgtatgcatacaaaataacagtaaaagtaatccgcccagtctgcaaattttcatgtcaatagcagtataagtctatattttagtttgagtcttagtaaacaatgtaaaattaaggagtttctttagaaagcttactattttattcattttattaaaacaaattacattccaatcacacaaggtcacaatataaactaacaaaaagacttcctccacatataaaaatatactctttgagaagaatatcctttttatagaggaagaagtctccctatcaacaaaaactatcaattagaaactcatgatcacttaaaattctccgtaaagaaaactcctgccggaaaactattcttattttttatatcaaactgtaaagccggtgttttattgaaatcaaaaatagcaatatcattggttttataatctgcatatcctttcagagtggcaaaataaacttccccgctcaccggatcaactcccaaactattataatagatccctgcatcctccacatactcttttatatcagcaacttcttccgtctcattctgagaaaaaatatgccgatatagcttaaagccggcattactgaaatagataatatcatctttagcagaaaaagcaggggcaactccccacccggcaccaatactgacattcaaagtatgagaatcaatagtcttataatcaaccggactgacttttataatactcgcaggctttgtacatgaaacccacaaattcccatcatatgttttagcaacaccggataaagcgctttcaaaagaaacagtatgtataacagtcccgttttgaataacaaaaagttgcttattgcccatcacaaaagctttgtctccaaccacagccatacgatttttcaaagcgcctctcgtcccctcaacaaaagtcagaacttcggtggaagtatccagcatataaactccattattatcacgaatataaagattctctccgactacagccaaattggacggccaggacaaagtagtattatcataaaccttttctttctccaaactagtagcattcgcaatagtcagcagcccttcaccaccatttttggctccattttgagaaagtatatacatcttattatcactgataaacaggtcttgacagacattaccaagcaaagtttgatttacccgataatatgcactatctaccgctatgccttttgaatccacaaaagtcaaagttccggtttcattccccatatttccttcattcaaaataaaggcacctttgccaaaccgcccttccaccttggctgtcatagtcgtttgaaggttttctcccttatcatccgataccgccagtcctataacatactctccagtcttaggctgtgaaaacttatatgttgaagcggttgaaacttcctttccgtctactgtccacaaatatctcatcgccccagacagattttcaatccgggcatccagatacaatgtatctaactgcgcaatcacattactttccgattcactcccgatccatacagatgagttcaaattttcctcctcatcacatgctgtaaaaaacagccccaaggcaacaactgccaatacaaaataccttttcatttcaaattcttattatcaattatttcttaacttatttgcgggtatcgatatcaactcctaaaacatgcaaatcctcaacccctgatatctcagtggaacattcacctaaccaaccattttcctgattgacaccggtatatatctttatgaaatcaattcccggcaaatgtaccttctgaccttttgaatttactgcccaatctatatcaatagcagactcatctttagtgttcacctcattatcagcataaccataacggaatttatacaaaacaaaataattaccttgtccactttcatcaacagcattttgaggtaaacaagtccctttaaatgttatcttatcttcttttatccattccggaaaataacactgattataaaatgtatttttcactttatatcccgaatttcctcggttatcttcccaccggatatatttctctctttcttccgaagtttccggttctttttccggacgataataagtgatttcatagtttcgataagtctccacatcatttcccgcagctacagccttgtcataccataattccagtgcagcgtcttcatgagcactaccggcaatctcataccattcgtcctcatccggcataccattctgatttttatcataagctaccatgatcactcccggctcacaacttcctccctccggtgcatcagagtccggattggccgcagaataaaaagcattgccaagtacccggaaatcgcgttttccggtaacattagttattgtatggtcaaaacctactacgacatatcctccgaaccctcctaaagaaatcatcccctttttattgttaccgatagctgccaatactttttcgttcatagcctcttgtgtgtctccttcgtcatatgccggcaacgcattagtaaattgtcccacggccggaacaaaatcaagaactttagtgatataagccgttgctccttcaggagccggttcgatattatcaaaagttactgtgaccgtaaaaagataatcataatgattctcaccttgtgacgcacgtaaaatcagttcgtattctcctacctcctcaaacatatactccaaatcttttgtccgggcaatttcactgccgtccagcaaccataaataagagatcccttcatccgactcactttcaacccgtaccttcaacagttgatcaacaacaaccgcaaagccaccctccggttgcgacacacggatgtcttcctttttcagtaggtaaggctccgaagcatcttctccatcattacatcctgtgaatacagttcctacaaacaaagaaactgcaatgactaatgctagtcttaaaattttcctgtccatttttattcattattagttattgaaatgttttcgttgtaaaagcaaaatgagccggtatatcccccgccctgactttccatcttttctttccttcaggactgaaacagtagagataaccgggtacaacataactttttgcatccgttacaaatatttctttggtctcgggatttacagctatcccatacggaattgttatttctgtttcagttccatcagtaataaaattgcgggatactattttattttgtttcacgtcatagagggcgtaagtaatagtattactttccgtcacataactccattctacacttgtcatgtaaatcgaatctccactcaaacacatttcactggcagcaattcccaaatttcctgtcacacgatctgtctgagtatctataataaaaacatccgatcccgttccataataatctcctctcgaactcacatatatacggccgtatctatccagtttcatacggtgaagatttatagctacatcaattgttttaataacttgaaaagtcttcaagtcaatcaccgataccgtccggtcatagtccggaaaacgataaccgccggaattggcaacataaagttttccatcttttattaccatttcttccggttgatagccgactaccacttcacgggttacagccaaacttgtcgtatccacttcaaccacttttcccggacgcgcattgggatctattccgacagggcctgcataagaacttacataagcctttccatcattaaaagtgatataccggcaatttgtcacatttatttgccccagatgttgtgccgtttccacatccatcacctctataaaattcgagcaattgattacggcatacagcttatctccataaatctgcaaatcatttccaacatcccccagttctttcactacggacggattccgctcggcataaatattacgatgatacttaccggtagtgctgtcataaaaatcaagcgtacacttattacttcccatatttccttcattgagaagatacattcctttaatactgacgccccctaaaggatccttgccaacatctatctcgtcagaaggtagaaccggaagctcgccccgacaagccagtaaacaacaacctgttaatataccaagcaagacacgcgaaagaatattattcacaatcatatcgttaagtttaaaatgaatttaaagttagttccgggcatcggataagacctcaccacctcatattgttgattaaaaatattgtttacttccaaggtcaacttgaaatcatactttctccaactgaatttctttgccaaagaaaaatcacttgtataccaaggaagacgataattctccggagtattggccgaaacgtcatagcgctctcccgtatatataaagctataattcaattcccacgatttatatccggcatttaatatagccgagccactatgccaggggatatacgatatttgtcccccatacgtatctttatccgacttatctgtaaaatcctgtgctttctgatacgtatatgataaccggctgtcaaatacccaatcgttaccaaacttccaaagtccttgcaaaacgacatccactccttttattttaacaagtcccatattaatcattgtccaacgaaagaaattattggtaggagtagctattattttattttccacctcattataatacgcatccaattgcacattcagtgcttgcagccaggttccggaagataatttctgataagtgaatcctaggttatactgattagtatactcaggtttcagctttatattccctataaatgtataatacaaatcgttcaaagtcggcatacgaaatatccgtttgtaaaaagcacgcagacttaaatcaatattcttgaaaggtttataggaagtgataacggtaggagtaaattccattttattcccggccgaagtagtatctgaagcaacgttctcatttacaaaagttcccaagacactggcctgcaacttaaaacgctcaaaatgcaaagaggtagctgccgctaccaacgccgtatttctccggggataaggaaaatctgtcaaattagcgttcagcttattccattggtagtccgctgaaatatttatatcccaaaaaggaaaaagagtaaccctgttagccattgacaggtaaacttcctgttggcgatatgtattatttacatacatggtagcctcctccttttggggatctgccagataatgcagataatcatacgcgtatttggcattcaacaacagactgtacacatcaccgaaatcttttttgaaagaagattggaaaaagaaatttgtatcccattggcgatcctcatgtgagaaacgattccgcacaacagcaccgggatatccacgttctgaattataaaaataagctttcgtacgccagtaaccactttttatcttgccatataagccgccctcagcacgcagtgcattgacatccccattacggcgtactgccgtagtatcatatcctccatccaccgcataagtaaatttatactttccggttgtatacatatattcagtactaagtgacgcactcacattctcactcagtttctgttcccaaagcaaagaaggattgacaactccgaaagaacccgtcttaaaagtcgctttcacatgataagccctattctcccgaaaaacgggtgttctcgactggagataaatagaacctgcagaaccaaaatctttcgccggttggaaaatggcacttttctgaccattatataaagtgacagcttccatattatccaaagagaaacgtcccaaatcaatcactccattctgcgcattacccagttcaataccgtcataaaacactcccacatgattcgttcccatacttcggatattaacggtcttcaacccgcctattccaccataatcttttatttgtactccggaaaaataacgtatagcgtccgctaccgaatgtgcagccagtttctccaacttatcccctgataaagattgcaccggaattacctccttattaattctggcagtaaccactacttcattaagatgatgcaaactgtccagtttgctttgtgctgacgacaataaagccatactcaaaaagcatcctatccccaataccctaaaataaatctgcccgaacataatcctcctgtttattaattaaaataataaactttcatagggttacagtgaggatgcaattttccatacactcaaacatatacacgtgcttctccccgcataatggaacactcaaaaaggcatattcctccttcctgaaacttcacatcaccaatcaaagatgtattttgaataaaaaactgcactcttcaaactctaatcccggaaagtttcaagaattcaattttggcaggtcttctgacttactccattttcctaacgcccttcccattcctccaaagcggaacagtggatttgagtattgtaggaaaacttttggcggagcttacagcagcgggtctgttcaggatttacacctgattcccttttcaccactctttccgtagaatcggaaaagtgacaccaaaatttctggggacaaagatacacaaataggaacaaatcgaaagaaaaatccaactaaaataaaaacaaactaataattaagtcctatctttgccgttcgaaaggacccactattatttttttctaattaaacatcttataaaagtgaaatctcctgctccgactatcacgttactttgcctgctctttttggcaagctgtatcacccgtaataatacatctctggaagcattcaaccaagatgtatatacccctgaatacgcttcgggatttaaaatcctgggtgctgagaacgctgccagtacgcttatacagattaccaacccgtggcaaggcgccaacgacgtaacaatgtcttattttgttacacgcaacggcgagcaagcgcctgccggattcaacggtcccgtcatccctgccggagccaaacagattgtatgcatgtcttcttcctatgttgccatgctcgatgaactgggagaagtcaaccggattgtcggagtttcgggcattgattatatcgccaatccctacatccttgcccacaaagattcaatcaaggatatgggtcctgaaatgaactacgaactgctgattggattaaagcccgacgtagtcttgctctatggcataggtgacgcccaaaccgctgtaacggacaaactgaaagaactttccataccttatctatatatgggggaatatctggaagaatcaccgctcggcaaagccgaatggatgattgtcctttccgaactgacagacaaacgggaaaagggaatagaaatattccaggaaattccccaacgttattacgcactgaaagccctcacggattccgtcagccagcgtcctaccgttatgttcaacactccatggaacgacagttgggtaatgccttccacccaaagttatatggcacgactgattgccgatgcaggcgcagagtacatttataaagaaaacagttccaacagttcaaccccaatcggactggaaacagcctatggcctgatacaaaaagccgattactggattaatgtcggttcggcaactacacttgaggagctgaaagctgtcaaccctaaattcgcagacgcaaaagccgtgaacgaaaagactgtttataacaacaacttacggttgacgccgacaggcggaaacgattattgggaatcggcagttgtccgtcccgacgttgtgttacgcgacttgattcatatttttcatccggagcttgtatccgattcactttattattacaggcgtctgaaatgaaacaaccccgcaaacatactgcacttttatttatcgcgctaggcataatcgccctgctattgctagtcatagatatggcaaccggagacacgtatatccctgtctccaaggtatgggctgtgctcaccggaggcgaatgtgatgaaatgacacgcaacattcttctttctatccggttcatacgggtaatagtggcggcactgataggcgtggcactctccgtaagcggtttgcagatgcagacagttttccaaaatccattggcggatccctatttgctgggagtaagttccggtgcaggattaggggttgccttgtttatattgggagctccactgctcggctggtctgaatttccactgctccagtcattgggcatcgtcggttccagttggataggaacggctgtcattttactgggagtagccgttatcagccggaaagtaaaaaatatcctcggtgtattgattatgggagtcatgataggttatgtggcaggcgccattatccagatactgcaatatctgagttctgccgaacaattaaaaatgttcacgctttggtcaatgggttctctcggacacatcaccaccacccaactgggaatcatgacaccgatgttatgcctgggactgctcatttccatagtctgcatcaaacctttgaacctgttgcttcttggagaaaactatgcacggacaatgggaatgaatatcaagcgttcacgtacactcatcttcatctccaccgcgctgctgacaggaacggtgaccgcattctgcggcccggtaggttttatcgggctggcagtgccgcatgtcacacggttgctgttcaacaacgccgaccaccggatacttgtccccgccactatgctgacgggacttatcagcatgcttctttgcgacatcatcgccaagaaattcctgcttccggtgaactgtatcaccgccttgctcggtgttccggtcattttatgggtaatagctaaaaacttgcatggattcaaatgattgaacttaaggaactgacattaggatacggacagcgcacgctgttgaaaacggtaaacgcccgaatcacaggcggacaactcgttgcactgctaggacgcaacggaacaggaaaaagtactctcctgcgtgccataatgggactggaaagtcctcaatcgggagaaatcaatctgcaaggaaaagacattgcttcactgaaaccggaaaaattagctctgagcattagtttcgtaaccaccgacaaagtgcgcatcgccaatcttcgctgcaaagatgtggtagcgttggggcgcgctccctacacaaactggctcggtcagcttcaaccggaagaccggaaaatagtagataatgccattcagttggtcggcatgtccggttatgcagaaaagacaatggataagatgtccgacggcgaatgccagcgaattatgattgcccgtgcgcttgcgcaggacaccccggttatcctgctcgacgagccgactgcctttcttgacttgcccaatcgttatgaactctgcctgctactgaaaaagctggcacaagaagaaggcaaatgtatcttattctccacacatgaccttgacatcgcattgtcgctttgtgactctatcatgctgatagataacccatatatgtacactttgcccacttcggaaatgataaccagcggacatatagaaagacttttccgtaatgaatcagtgacattcgacgctcaggagatgagggtgcgcatcaaatcagtatagtctcaaacttttctttatatcaaaataattgctacctttgttcctacaaacagaacatacgtagtatgtattaccgtatccgcaacaaagaacgcttgctacatccttgcgagcaagaacagattgcggctatctttttgaaacatggtattaagaccaaacccgaatttgaccggtatattgataaatacgactggtaaatcgctgttccagtatgttctgacaaagggttattctcaccgtgatgagaatactttgagaaaaacactatcttttttcgaaggaagcaattagtcggtcggatgcagttgccccgccgctttcagataagcaatataattcacatacaattggaaatgagcgtctacacgtgtctggtaagcctgttgccagagcatttgcgcttccaaataatccgagagagtttccagtccgacctcatactgtttgccgctgactttcatattttcttccgcctgttccagtgaacgatcggaaagttccgtttcaagacgcgcctcatccaagttattagctgcctgcattaattccagcaacatcttttcactggcattttcttgttcaagacgagtttgttcgagtttcgctttggcggattttaccttattggtacgttcaccaaaatgaaacagggggacggagacattcaaaaaaacggagaaagctccttttttcataaatgtttcgtcgttgatttccagcccgtgaagatagtcgtagctgcctctgacgccgatacgagggagcaattcactacggttcagcttcacttcctgctcagcgatagcaacttgtttgttcagtattccatattccggacgggcggtaatatcggaaacctggattttccactcctgttccacttcggggaagtcatcggaaatatcaatttgcgttgtcaagggacgtccgatgtaatggcaaagattcatggaagcaaggcgaagggcattgtctgccttacgcaaagaaagttcgctgtcgttgagcttcacttgcactttcaatacgtcattctgaggtttcatgccatgttggtgggcacttttcacgttccgggacagttccgtcaataaagcgtgatatttctcggccactttcttcatttctttggctttcactagttggacgtaagctttgtccgtattcagaagaacttccgaggtagtcagcgcttcgttcaggtgagccatctctttacccagcaaagacattttataggccgcacgaattttgccgcccatatagagaggctgctccatttgtatgccgccggaataaacggttcctactttataatccaggttcaacccggggaaataggcgaaaccgctggataccagttctcccgtagtggggttgggcatgaaaacagggagattaccgcccggaatgccgagacttccatcggcagtgctgtaaatccctgttccgttggcggtaaagttcgggaaaaaattggctttatagctgagggacatcaaccgcgctgcttctgtctgccggtcggcagcagccatttccttgttgtatttcaacgccatttcgcggcattgtttcaggcttagtttctcttgtgcggaaagagaaagcgttgtgccgaacaatatgcccgctattattccaatggctgaaagaatctcttttttcatttgtctgtcttttttatatgaaagaatagtgcatacaaaataggaataaacaataaagtaatcagcgtaccgaacaacagtccgcccataatggaagccgccaatgagccgaacatggcatccggcaacaatggaatcattcccagaatagtagtgagcgatgccatcatcacaggacggagacggctctgcgaactatctatcagtgccgttaccggttccactccctgactgatttgcagggtaatttcatccatcagcacaataccgtttttgataatcataccgataagtcccagtgtaccgacgatagcaacaaagttgaacgtctttccggtcagcagcattacagctaccacaccgacaaataccaaaggaatcgtgcagaagatgataaccggcttccgataatccttgaacagcataatcaagatagaaatcatcaggatgatagcaaacgggaagttcttgaacaaatactgcatggatttcgtgctggcatttctttcgccttgccattgcagcttgtagccgtcaggaagcggaatccgttcaatctgcccggcaatagactgccgggctttctccgtttccacgcccggaacaggggaacattgcacgcgctggctacgttgcccgttatagcgggggacaaccgggtcttcccattccacgtctatccgcttgctgatttgtttcagcggagtagttcccattaaagtttccacaagttcctctttagagagtgttcccgctttcagcttcatcatcatctcctgtgtcaacaagccgttgagggaaggaagggaagaaaatatctgcgtgttatccagattctcaataggttttccatgttcgtcaagacagcgcaagtagatgttatccttatgaattccttcgtagaaagaaccaatcgggataccactcgtagccgtgagcagggaaagactcacgtcatttcggctcagtccgatagcacgtgccgtaggctgatcgtattcaatcgtcaggacgggaacctgcggttcccagtcggtggtaatcagacagacgtccgggcaattttccatgattttccgggcactgtctgccagttgatgtagcacggcagggtcgggaccggtaaattgcgcttcgataggatatttcttgaacatcaggttatagcggttcagcttcacataggcgtccggataatgggaagaaagatactgttgaatctctgccatgttgtcgaccagtgcatcgggcgaagtaaagtcgattatcagttcaccgtaagataaagaagggttggctatattacgtaccaagttgtaacgggcaggcgtcccgccgatagaagtggtgacgtgcgtgatttcaggacgtttcttcaagtaagcctctatctcttccaagtcgcgtgccacccgtgtggaattaatgccttcgggaagtttatattccatgtatagctggtcgtagaccatatccgggaaaaaaccctgcttcataaaccggtaactaaaccccgaaagtaccaccaaggcaatcatggcaaagacaaagctccagcgatgtgccaggctgaatctcaataatgaacgcagcactgcatatatttttccttcgtacacccgctttccggtagtggcagtagctgcggatacgtccggatgcagaatccggttcgccattaacgggacgtgcaccaaggcgagtacccaactaagcagcagggagaccgccaacacaataaacaagtcgcgcgtgtagactcctgccgtatcgggagacatgaatataggaaggaaagcgataatagcaatcagggtagcgccgagcagaggcattgccgtctgccgcccgatagcggtcatggcttccatgcggctctttccggctttcaaatcgaccagaataccgtctataatgacaatcgcattatccaccaacattcccatggcaagtacaaaggatgccaaagatacacgctgcatcgtgccgtccataaaatacaaaaacaggaaagtgccgaacactgtcactaccagactgataccgataatcaccccgctcttgaatcccattgcaatcatcaggatgacaactacaataatcacggattctatcagattcaggataaatgtccccaaagaacttccgacacgttcgggctgatagaataccttgtggcactccattcctgccggcaggcgttcggctttcagttgttcaagtttctgctccacccgtttgccgactttgataatatcggcatcgggagaggcggcaaccatgattcccatggcacgctgacggtcatagaacaattcgttgcgggtggggtcttcatagtctttttcaatgcgggcgatgtcactcagacgcagctggtcggcatcgtgtccctgaatcagcatacgtccgatgtcttccaccgtcttgaatttatcgctgaccgtgacccggatacggctgtcaccgttgtcgtaatagccggtataggttgttttattctgtccgttcagggtggcaagcacttcggcaggtttcacacccaagttggccattcggtcttgcaatagggagatgttgatacattccggacggttgccgtataaatcgacgcgttccacaccgtccaattcgctgacttcacgtttgattaattcggaatagtcggagagttccctgtcagaaagtccgtcgcccgtcaaggcaaaaaacattccgtagacattaccgaaatcatctttcacgatagaagggctggcaccttcaggaagttccgcctgtgcgttcgccaccttacggcgcagcaagtcccagcactgttccacgtcggtttccttgacagtcgttttcagttctacctgaatcagggagaggtcgttgtaggaatagctttccacattatctatattccccatagaacggatattcttttcgagtacatccgtcacttccagttccacctgatgcgcggatgcaccgggataggtagtaaccaccatggcgagctttaccgttatttctgggtcttccagtttactcatctcgtagctggaataagctccgcccacaatcagtacagcaatcaggaagtagattaacttcttgttttcaaatgcccatttactaatatctatcatagcagtcctcccacattcgtttcggcagccggaagaagaggttccacctgttgcccatctttcacatgatgcactcccgagacaacaatcaagtcacccggtttcacttcgtccgaaactataaggcatctgccgtcactaagcaagcgagtaacggtcacatcgcaacgacgaatcgttttatcggacggattataaagaaagacacccgtattcccgttctgacggagaatcgctccgccgggaacggacaggttacgcatttccccttcggcacattcgatagtgaccattgtattcatccccggagaaggaaccgcctgcttgtctccgcttttcaattgaaggcgcatggtatagagctggttggcattcgctttgggagtgacgctaatcaaatccagcacatatctctgctgcggatatacatcgaatgtgcaataatagcgggtaaactgccggcgacggatatattccactgccggaagattaatctccacttccggcgttccctcgctgattacggaaacgacaggcattccggcagccaccgtctcatgggagtcgaaaagacgtttctgtacatatccgctgaaaggggcatacaggcgggtatattccaactggtccttagcatggttgtatttggcggtaatctgcctcagtccgtacacggctttgtcgtttgcgtcgggagtggttacattttccttataaagagccattacgcgctccgcttccgccttgacacgctggtattcggcttccaccgcatccagttgaatctgataatctgtaggatcaagttcggcaagcagttgtcctttgcgcacataagcaccgtcattcacatacatacgctggatagttccgctcacccggaatgccaggcttatgtcctgagccgctttcacccgtccgggaaactgcaaggcagtctgtttgtcagcagaaagtacggtatcaatcttcactgccggcttattttctatattctgcacacgctgattgcatgacgccagcaaaactgcaagaagtcctgtcaataagaagtttaatcgtctcatattttcatttgttatttagttattacaaaaatatcccaagcaaacaagtggggaaaggttgatatagacgaaatattgttctatttgtaggttatcggagataaaaagccggaatagtttgttatttgtagctatttgtttgttaatttgcagtgaaacccatttgaaacgaaaagatacatggagccactgatgccattcaattatgttataataactccggaagatacatctatgagtgaagggtgtatgtcggcatctctcccaaggagtatcgcaacaagcccgtcagacagacactttcctgaattgcttgaactgccaccaaagcattgtcccggcaatcaagcttgctataagatcggaaatcggcatacttatccagactcccagttgtccgtagaactgtggaagaatcagcagacaaggtatcaggataagaacctggcgggagacagacaaaaatatcgccttactcgccatgccgatactctggaagaagttggaagtcaccatttggaaacccacaataggaaagaacatcacaacaatacgcagccctttggcagaaatgcgtaccagttcttcgtgtgtcgtaaaaatcgagactgctagccggggaataaacattcccatcaggaagcctgtagtggtaacaatggttgctgcataaatagttattttcaagacttttgtcacacgcggatattgcttggctccatagttgtaaccggcgatcggctgcataccctggttcagtcccattacaatcatgacaaagaggaataccaatcggttgacaataccgaacgctccgatagccaagtcaccaccgtgatgctgcaaaccttgattgataagaataacgatgaaacaggctgccagattcataaggaaaggcgccataccgattgctaaagaatcgactacgattttcttcttcaaccggaaaattcctttatggaagtgcaacagttcttctttgttagagaatagcttgaactgccatgccaatgcgatgacctgtgcggtaatggtagcgattgccgccccttgtattccccagccgaagccatagataaaaacagggtcgagtatcgtattaatcaccaccgtggcaatcgtggcaaccatcgctttctgcggatgccccgccgaacggagtacggcattcagacctaaataaaggtgggtgacgacgttacccaataagataacgaccatataatcacgggcatagcctaccgtggcgtcactaccaccgaagaaataaagaatagggtcgagaaatatcagtgtgacaaccgtaaaggcaagtccgatgataatattcagtaccagcacattgccgagtacccgttgtgcggtgtcgtaatctttttgtcccagtttcaccgagaccaatgtagccgctcccacaccgaccagcgagccgaaagcggcagcgagattcatcagcggaaaggtcagcgccaatccggagatagccattgcccctaccccgtgaccgatgaaaatactgtccaccatattatatagagaagatgccgtcatggcgataattgccggaatggcatactgcattaaaagcttcccgatcttttccgttcccaacgcagtgggtgtcttttgtcctgtcatacctattagtttgagggcgcaaagatacaaaaaagagacagattacgggatatatgagaaaagtttcgtatttttgcccacaaaattgagttaatacgtaacgaaatgaatatactagaactaagtgaacaggaaatcattcgacgcaacagcctgaatgagcttcgtgcaatgggtatcgacccataccctgcagcagagtatgtaaccaatgctttctctacagatattaaagctgaattcaaggacgaggacgagccgcgccaggtttctgtagccggacgtatcatgagccgccgcgtaatgggtaaagcttcttttatcgaattacaggactctaaaggtcgcatccaggtgtacatcacccgtgacgacatctgtccgggaaaagacaaggaactgtacaacgctgtattcaaacgcctgctcgacttaggtgactttatcggtatcgagggctttgtattccgcacccaaatgggcgaaatcagtattcacgcaaagaagctgaccgtacttgcaaaatccatcaaaccgcttcctatcgtaaaatacaaggacggcgtagcttacgactcttttgaagatcccgaactccgttatcgccaacgttatgtagacctggtggtaaacgacggtgtgaaagagacattcctgaagcgtgccaccgtagtgaaaacactgcgtaacgctctcgatgaagccggatacactgaagtggaaacgcctatcttgcaatctattgccggtggagcaagcgcccgcccgttcatcacgcaccataactcactggatatagacctttacctgcgcatcgcaacggaactttatctgaagcgactgattgtaggtggttttgaaggtgtatatgaaatcggcaagaacttccgtaacgagggtatggacaagacccacaatccggaatttacctgcatggaactctatgttcagtacaaggattacaactggatgatgaacttcaccgagaaattgctggaacgtatctgtatcgctgtaaacggctgtacggaaagtgttgtcgacggaaagactatcagcttcaaagctccttaccgccgtctgcctatcctcgacgctatcaaggaaaagaccggttacgacctgaacggcaagagcgaagaagaaatccgccaagtctgcaaggaactgaaaatggaggaaatcgacgacacaatgggtaagggcaagttgattgacgaaatcttcggcgaattctgcgaaggtacttatatccagccgactttcatcaccgattatccggttgaaatgtctccgctgaccaagatgcaccgttccaaaccgggactgaccgaacgtttcgaattaatggtaaacggcaaggaacttgccaacgcctactcggaattgaacgacccgatcgaccaggaagaacgcttcaaagaacagatgcgtctggctgacaagggtgacgatgaagcaatgattatcgaccaggacttcctgcgttctttacaatatggtatgcctcctacatcgggtatcggcatcggtatcgaccgtctggttatgttaatgaccggtcagactaccattcaggaagtgttattcttcccgcaaatgcgcccggaaaaggtggtgaagaaagacgcagccgccaaatatatggaactgggtatcgcagaagactgggtgcctgttattcagaaagccggctacaacaccgtagaagacatgaaagatgtcaatgcgcagaagctacaccaggacatctgcggcatcaataagaaatacaaattagaactggccaacccgtcggtaaacgacgtaactgattggatacagaaaattaaataagttcttcatccaaatccatacaaatgaaattacccggtaagatagcgataatgggcggtggaagttgggccacagctattgcgaagatgtgtctggctcaagaagactctatcaattggtatatgcgacgcgatgaccgcatcgctgatttcaagagattggggcacaatccggcttatctgacaggagtgaaattcgataccaagcgtatctctttcagttccaacatcaacgatgttgtgaaagaatcggatacgctgattttcgtcactccttccccttatctgaaagctcacctgaaaaagctgaaaaccaagataaaggataagttcatcatcaccgctatcaaaggaatcgtacccgacgacaacgttatcgtatcagaatactttaccaaggaatacggtgttcctcccgaaaatatcgctgtactagcaggtccctgccacgcagaagaagtagctttggaacgcctttcttatttgaccatcgcctgcccagacaaagacaaagcacgtatcttcgcgcgccgactgggaagcagctttatcaaaacatctgttagtgacgacgtatcaggtatcgagtacagttcggtactcaaaaacgtatatgctatcgccgccggtatttgcagcggactgaaatacggcgacaactttcaggccgtactgatttccaacgctatccaggagatgaaccgtttcctgaatacggtacatccgttgaacagaaacgtagatgaatctgtttatctgggtgacttgctggtgaccggctattcgaatttcagccgtaaccggacattcggcacaatgatcggtaagggatattccgtaaagagcgcacagattgaaatggaaatgatcgctgaaggttactacggtacgaagtgtatcaaggaaatcaacaagcatcatcatgtcaatatgccaatactggacgctgtgtacaacattctatacgaacgtatctcgcctatgatcgagattaaattactaactgattcttttagataacctttaaacaagaaagatatgattagcttgaacattgaaaagacttttggatttatctccaaagaaaaggtttctgcctacgaagcagaggtaaaagccgcacaggaaatgctggaaaaaggaactggaaaagggaacgactttttaggctggctgcacttgccttcttctatcagcaaagaacacttggctgacttgaacgctaccgcaaaggtcttgagagacaactgtgaagtagtgatcattgcaggtatcggtggtagctatctgggcgcacgtgccgtaatcgaggcgttatctaatagcttcacttggttgcaggaaaaaaagacagctccgatcatgatttatgccggacacaatatcagcgaagattatctattcgaactgactgagtatctgaaagacaagaaattcggtgttatcaatatctccaaatcgggaactactaccgaaactgcgcttgccttccgcctgttgaagaaacaatgcgaagaccaacgcggcaaagaaactgcaaaacaggtaatcgtagctgtaacagacgccaagaaaggtgcagcacgtgttactgccgacaaggaaggttacaaaacattcatcatccccgataatgtaggcggacgtttctctgtactgactccggtcggtttgctgccgattgctgttgccgggttcgacattgagcaactggttgccggtgctgccgacatggaaaaagcatgtggcgcagacgttccgtttgcagaaaaccctgctgctatctatgctgctacccgtaatgaactgtacagaaatggaaagaagatcgaaatcctcgtcaacttctgtccgaaactgcattatgtaagcgaatggtggaaacagctttacggagaatcagaaggtaaggacaacaaaggtattttccccgcatcagtagacttctctaccgaccttcactctatgggacaatggattcaggaaggtgaacgttctatcttcgaaactgtcatctcactggataaggtagaccataaactggaagttccttctgacgaagccaacctggatggtctgaatttcctagccggcaaacgtgtggatgaagtgaacaaaatggcggaactgggaactcaattggctcacgtagacggtggcgtacctaatatgcgtattgttcttccttcattgagcgaatacaatatcggcggcctgctttatttcttcgaaaaggcttgcggtatcagcggttatctgctgggcgtgaatcctttcaaccagccgggtgtagaagcatacaagaagaacatgtttgcgttgctgaacaaaccgggttacgaggaagaatccaaagcgatccaatcaagattgtaatagaatctatacataaaaaagaacggtcttaataagaccgcttcttttttatgttgtctatcgacattccgttcttaatcttcctcctctacctctttggttttcaagccgatttcctcttgtgcgccttcgcattcagccttggaggaaagatagaaagccaacttcacatcaccgttcttatctacatgttcaatagtagctttcaccatgaccctggtttgcgtcacaccgtccttaaaacgtaactgacctttttcctcatccgtcaggtttccttcggtagagacttcggctttttcataacgaagttcggctttcaccgcttcgtcattctgaagtttaaaggttttaagttcagctccattcccatccaagagcaaaaaagcattcaccttatcccctacctttaaagccggcagattatctttctgattagtatagtcttcccctttagaatcctcactgtccggatcagtatttacatacagtctttctatcgtgataacaggactctccccactatcggaacaagcacctaaaaacaaaggtagcaacaataatactctctttttcatgctatcattgagtttataatgctacaaaaatacacataatcttctaaatgacaaataattggatactttattgctcaaagagcccgcttgcaactatccgtccgttttgtcttatctctcattttttatagttatctttgcctcgtatatgtttcgaaataagaagattaaactctaaacagataatggttcactatttataaagtatgaagaaaaaactgaaagccgtcctgttcgatatggacggcgtgctttttaattccatgccctatcattccgaagcctggcataaggtgatgaaatcacacgggcttactcttagccgtgaagaagcctatatgcacgaaggacggacaggggctgccactattaatatcgtatttcagcgtgaactgggaagggaggccacgcaggaagaaatagaaagtatatatcaggagaaaagtgtcttattcaactcgtatgcagaagctgaacgtatgcccggcgcatgggaactgttgcaaaaagtaaaaggtgaaggactcactccaatggtggtaacaggttccggacaactttcattactcgaacggttggagcataactttccgggaatgtttcacaaagaactaatggttacggcattcgatgtcaaatacggaaagccaaacccggaaccgtatcttatggccctgaaaaaaggtggtctgaaagccgacgaagcggtggtagtggagaacgcacctctcggggtggaagccggacacaaagccgacattttcacaatcgctgtgaacacgggacctctggacggacaggtattgctggactccggagccgatttattactaccgtccatgcaagcgctctgtgaagcttgggatggacttgatttatagaaattctaaccaacaaacgacgattctatcatgcaaaagttattatctttacccccaaacctgatccactgttttcacgaactggaagaagttaatcataacgaatggttttgtacatccgatcccataggcagcaagcttggctccggaggcggaacaacctggctcttgcaagcctgccaccaggcatttgccccacaagagtctttcaatgattggataggacgcgaaaaaaggatattacttcatgcaggaggacaaagccgccgcttacccagttacggaccttccggtaagatactgacccctatcccgatcttcagttgggaaagaggacaaagactgggacagaacctgctgtctttgcaactcccgttatacgaaagaatcatgcagcaagcgccggccggcatgaatacattgatagccagtggagatgtatatatccgttcggaaaaacctttgcaggacattcccaatgtggacgtcgtatgctacggcttatgggtaaatccttctctggccactcatcacggagtttttgtctccgaccgggaaagccctgaagtactcgacttcatgttacagaagccctctctggaagaattggaaggtttatccaagactcaccttttcctaatggacatcggcatctggattttaagtgaccgtgccgtagaggtcttaatgaagcgctcgctcaaggaaggaacgaatgacatcgattactatgacttatattccgactatgggctggctttgggagaacatcccaagacggaagatgaagaagtcaaccaactatccgtagccatattaccgttacccggcggcgaattttaccatttcggtacaagtcatgaactgatttcttctacgctagccatacaggacaaggtacgtgaccaaagaaagatcatgcaccggaaagtaaaaccgaatccggcaatctttatccagaactccagtacacaagtctccctctgtgcagataacgctaacctatggattgaaaacagccatgtaggggaaggctggcatctcggatcacgccagataatcacaggtgttcccgaaaaccaatggaatataaatctgccggacggtatctgtattgacgtggttccttttggcgacaacgcattcgttgcacgtccttacggattggatgatgtattcaaaggagcattgaaaaatgaaacgaccacatatctcaatatccctttttcacagtggatgcaggaaagagcccttacttgggaagacataaatggacgcacggacgatttacagtctgcttccattttcccggtaacagcttccgtagaagatttgggtatattgatacgttggatgatctccgaaccccaactggaagaaggaaaacaactttggctaaaagcagaaaaagtctctgccgacgaaatatccgcacgcgcgaatctgaaacgactgtatgaacagcgtagcgcttatcgccggagcaactggaaagggctggccgacaattacgaaaagagtgtattctatcaacttgatttgcaggatgctgccaaagaatttgtccgctttgatttagccacgcctgacatattaaaagaagacgccgcgccaatggtcagaatccacaaccggatgctacggggacgtatcatgaagctacacggcgacagcaactataaagaagaagaacaatcggcattccaacttcttcgcgacggattattgggagctatgcccagccggaagaaccagccccgtctcgatgtatattcggaccagattgtatggggacgtagccccgtccgcatcgacctggcaggagggtggacagatacccctccctactctctctattcgggaggaagtgttgtcaacctggctatcgaattgaacggacagccacccttgcaagtatatgtgaagccatgcaaagagtatcacatcgtacttcgctccattgatatgggtgctgtggaaatcatagaaaactatgaggaactgcaagactacaagaaagtcggttctcctttctctattcccaaagcggcccttactttagccggatttgcaccggaattttccgccgagaactacgcttcgctggaagaacatctgaaagccttcggcgcaggactcgaaattaccttattagcggcaattcctgcgggttcggggttaggaaccagttccattctggcttccaccgttctcggagctatcaatgatttctgcggactggcatgggatagaaacgatatttgcagttatacattggcattagagcagttgctgaccaccggcggtggttggcaggatcaatatggcggtgtttttcccggtgtcaagttgcttcagtccgaagccggtttcgaacagaatcctttagtgcgctggctgcccgaccaactattcacccatcccgactatcgcgactgccatttgctttactacacaggcatcacccgtacagcgaaaggaatattagccgaaatcgtcagctccatgttcctcaattccggtccgcacctcaccttattagccgagatgaaagtacacgcaacggacatgagcgaggctattctacgtggtaatttcgagaacttcgccagtctgattaataaaacctgggcacaaaaccaggcgctggacagcggcacaaaccctccggcagtagcagccattatcgagacaatcaaagactatacattaggatataaattgcccggtgcaggaggcggcggttatttgtatatggtagctaaagacccacaagccgcaggacagatacgacggatactgacagagcatgctcctaatccacgagcacgttttgttgatatgactctttccgacaaagggctgcaagtttcacgaagctaataaaagaatagaggttgtgtcagtatttttgacacaacctctattcttttaaatgtaattattttataagaaatatatcaacgatcttcacagacagttgatatatggggtaaaaaaagcatatcggaaatcaaaccgatatgaaagtgtcggttaagatataccgctgtattcttcttaaccaacgaaaaatgtagggttcttcatcttgtagtatgaagttagggacctacatatagcaattcaatataaaatgtaacatataatactaatattcagatcaatatgctatttaaggactatttaagaagatagcttctcatataacataactgcttttatcaactgtagattctccctgcaaaaccaaggaaagtcaacacaacggaaatcaacacgatattcatcaagcagatcgtaaaagcgaatatcctgtatcaactcacgaactgaaatgaacagaagcaaatacttcttccttttacaataaaacaatgctttctgcagttctgcataggcaatattttctcctgttttacattctgaggtttcttcatcacaaaaagacaattgaatctttaacgaattattccgttccaaatattcagtcaatcgttcttgtactacaggagaggaagtattaccatataatacaacatctttatattccatatccgatatttccccagaaggagtgcttttcaagtcagaacacaacatattatattctttaaagaggctttgtttcgtaggtcttcgtaatttttcaacagaatagaaagcatacctgaatacaaaatgtgtcccccgcttctctattgtttcctgttctgagaaaaaagcatgtaaacgccttttattggtttgaagagattgcttgggaatatcttcaagcgtatctgtgatatattcgactaccgtctttttcatatatcacagatttatctgtcacttttctccatatccatagccgtagccataacgtttaccataaccgtagtacttaccgtacttgccgtaaccgtagtaataaccgtattttctctttttcaagtccacaccgttgattacggtacaaagcttagacaacttcttctcaatagccaactcattgatcaatgtatattcggctttatgagtatagtcggcacgacatacgtatactgacaaatcagccacacgacctaccaataaagtatcggttaccataccgataggggcagtatccattatcacatagtcgaagttctgcttcaagatttctatggctttatccagaccgttacgagctaacaactccgttggattaggaggcacagcaccacccggaagaataaacagattcttattgatatcagaaggttgcacaagttccattagatccgtttcaggattggaaagatactgagtaatgcctttctctttattggagagatggaatactttattcagtcccggcttgcgaatatcgagtccgacaatcacgaccttctttcccaaaagagaaagactgatagccaggtttgccgaaacaaatgattttccttctccgctgactgttgaggttacaaggataaccttctgatcattatcgagcataaactgaagattggtacgaatattacggaaggtttcactcatcagattattcttgttctcgaagacagcaatagaaccattcttatcattcttttcgtcagtcaatggaatatcacctataataggaacactcgtcagtttttctacgtcggcacgcccttctatcttgaatttcgtcagttcaatcaggtaaatgatgccaacaggaatcccaacacccaacaccaatgcaattaaataaatcatagagcgtttgggagataccggagtatcatcagctatcgcttcatcaataatcttcgcattatttgcagtagcagctaacgcaattgcattctcttcacgtttctgcaacaacatcagatacaaccctgctttaatttcctgctggcgggcaatgcttacataagcacgttcctgccccggagcgttactgatacgacgagagtagcggcttgcctcacggtccagatttgacttggttatcatcaacccctgcaaagttccttcaagagtagcctgtacattagctttcatagcacgaatactcgtatccagattcacaatagccgggttattctctgttgatgtacgtagcagacgtttacgttccaccaacatttcattataacgttcaatcgcaccaatcaaggcagcatcctgtaaaccaacattacttggtaatacttcatattcattacctctcaagtatttacgcaagtcattcaccagactgatttgagtacggttctccacactcttcttttcatattcagcattaccggctaaggctatctgagcttcactcgtcaagtccgtgatacctgcgtcacgcttaaaggtttccaaatccgcttctgtacttcccagttcttttgaaataatactaatacgttcatcaataaactcagcagtcttctgggcgatttcgtttttatcattattcgtattacgattatacatctccagtaattggttgataaaatcctgtccacactgcaaactggaattttttaatgatatcacagccacagaagtagtcttggaggttggcgcaatagacaagctgctgcaatacccctttgccactctcatcggtttgttgatagtcgcagttatatgacgtacgctcttctctaaccgaggtactttcgtgccatcctgcaaagttaccgagtcaacatcttgaaagaaagccaatgtaccttcatcagtcgggaagatagcaggcagtttctcaaaatgcttctgatatcctttctcaccaacagtcacattcacatctatacttcctttaggctgtagtatcatttccactaccatcggagaacttagtttctcagcctcctgaggtgtcaaacttacttgtaccggagatgtcttgtataaacttttagccggaaactcatcctcgtctttataagttatatataggtttaattgattaacaacttcttttacaagcgtttttgagcgtagtacttccaactcgttatcaatgttcttagaagaagtcatcagaccacttaaccccatatcctccaattccgaagaaactcccgaacctcctcccttcttctcatcttttattagaacggtggctgaaatattataaatgggggtagcccaatgcagataaaaccatgcaccaacaaggcagagcaacactgtccctacaaaccaaggccaatgaataatatatttaaaaagcaatgtccggaaatctatttgttcttcagccatttggcgttccttcccgttttgattttcttctttcatgactctttctttttatttcaagatgttaaacaacaagctggcaatagaaacaaggatagaagtagcagagaaccataagcttgtactagttccgatatctgagtttcgtgctttcgccttattcggagtaacgtatatgatatcattctgctgcagatagtaataaggggaaagaatagtctcagccttattcagatccaatggaattatttcctgcttgccattagcattctcccgtattagttttacatcatcacgcaaaccatatacggtcatatcacctgccatagccaaagcttccaggatattcactttttcattggaaatcgtgaatgtaccgggacgggcaacttctccgatcacagaaatcttataatttaccatacgtactgttacaataggagtttcagtaatataaggtttcagcttttcaacgatcatttgttcggttgccttcttggttaggccaccaacatgaagttcacccaatacggggaagttgatattaccgtcattatccactagatattgttgcaatacaggctgagtagtagtggtatttaaactgagattgctctgtgtggccaccgttagattaaaaggtgctgccaattcggggctcgtacatgacaccactatcgttagcaggtccttgggcatgattttagcatcatagagctgttcgttctgggtactgtacaaaacgacctcagcatcctgcaggtaaggtacttttttgtaggactgacaagcagttaacaaaaaaactaccgacacgcaatagaataattgtttcaatcttttcatatatttctttcttggtgattatacaattctccgcaaaaccgggtattcctattccacccggtcactacggtatattgttagaattctcgagtaagttctttttattttatatcgaaataaacaaacgcaggatatttttactgatccttctgcttcttctttcgccctctagtatgtccattcatatcccgcatctccaccatgtcgagggcatctttagtttccactcctccaacgtaccccgattgttcttccggcggacagattttatcttattcaaaaactggatatgtttattcggaaagtgatagttttctgagacatatgctcttaactcgtcacagaagtgctcctttctcgtcttcttatcataatatactgagactaggaggatcatttttcaaagtgtcatggattcaacgaggaacttttagtacaagggtatcggaacctaccttaatgaactccccaactagttccttcacataaagcttttccaacacgtctaccgaattttatttagcataggagtcgattgtccaaatcatggaagacttgttcgcagatttgctgacggacaaccaagaaaagtcgcaatctgaaaaagtaaatctctatggagctaatccaaacgcctatagtatgtagccgatgtaacggccattgcatttttatgggaaatgtaggtgagattcatatttgttaatatcagcatattcctattgaacaacaggcactaattttacttatgtcgccagagccattactactttttaagtacttcgaggacttaaactgcatctccaaggctaatcagtatgtatcttgccacatactccgataccattaattacatagagtcagatctctactccatttctatgaagtcagctattttcttttttaatttttctgtaatcataatattgaccttgacagttatttaattcactcttttgttataccttgttttatctgtctcttgaaatcccaaaatgtatgcacagaatttacacaaacttcttatacccttcttaaattccttcattggaataagataaagaaattagaaagacttaacgatatctgcgaagttctcaataacgtaattaacgtcctccattgtcatcttggtatttaaagggagagtgatttcgttctcgaacatatggtatgcattagggaagtttttaatgtcgaagcccatccttttataagctgtcatcataggaagtggcttatagtgaacattagtagcaataccacgttctgccatcttctcaattacctcatttgtctgctcacgagtctttcccaacaaacgaacaatatataaatgaccgcttgaagcgtgttcctttccataatgttccagtacagctacatttatatcagcaaatgcggcatccattttctctatcattttcttacgctttgcaagcatttccggataacgctcaaactgaataaggccaagggcggctacgacatcggtcatattgcacttgaaccatggtcctacgatgtcatattcccatgcacccaacttagtcttagcaagagcatctttattctgaccatgaagtgacataagctgacagatacgatagatgcgctgattccaattgtcaccttcactcattgatactttactaaaagttttatcctgattcaaatcaaggtcgagaataacaggctcttctccaaatggtagatgccacgtcaacgcgccaccttcagctgttgtaaaattcttcacagcatgaaagctaaatgatgaaaaatcagccatagctccacacatcaccttctttccatctttgatgcgatagccgccaaatgagtgcgcacagtctgaacaaattgctacacggccaatctttttttgaagatctgtctttggacggaacaaatcctttttacgctttacgatctccatcaatcggtcgtagtcacaaggaatgccaccaagatctacaggaatgatagccttggtattctctgtgataacagcctctactgcatcgtaatccatttcaagacaatccgtctgtacatcaacaaaaacaatcttcgctcctacatgatcaacgatagaggcgcttgcggtatatgtatacgcaggaacaatcacttcatctccagttccgatacccaaaatacgtaaagccatctcagcgcatgctgtctgtgagttaaggcatatacagttaggtgtctgaacatctatactatcgttcacacctacatatttcgccacaaacttctccaatctctttgtacgcggacctgttgtaatccaacctgaaaggattgcatcacgaacctcgtttacctctgcctccgtcatatcaggaggactaaaaagcacatttcttcttttcaaatttgtactcattgttatttagatttgaatgtattataactattattctctttctgttataatcactttaaatgtctggaaaatgagtttgatgtcataccagaaactagcgttctccacatattcaagatatagcttgatcttctcttgcatgattacattgatatagtaatcttctggatcttccgctttctccatcagttcgttctcattgcgaaacttaatactagcagggtctgtgatacctggacgaacatccaatacatgcatctgctcaggagtccaatagttcacataatgacgtacctcaggacgaggaccaacaaaactcatctccccgagaaatacattaatcaattggggaaattcatccagcttatacttgcgaataaaatagcctgagcgtgtaatacgagggtctcgaccaccaatggtcacaaggctacctttatctgcgcccactctcattgaacgaaacttaaatatacgaaagtccttgttatgtcttcccacacgcacctgccggtagaacacccgcccctccgaatccaacttaatccagatagccataacaagaaacacaggactcaacaccagcagaccacatccgctggcaacaatgtcaaatattcgtttcataaaaaacactcatttatgtttatgtcaaaagaacccctccccaataggggtacaaatgtgaaaaagatactattttatttattttgacttatcgtggagctattccttacaatacttatcataaacatcttgataaatattacgtatttcatcaaggaactcctgtttcctcgtacataaaagaaattagctactcacttatcttttgataaatgattttttttacaggatttgataattttgcattaacaaacagatcaacctcaaaatcgtcatcacatataaccgactttgctaaatttagaatgtcactctctgtgatttccgttacaattaaccaatctgtgctatgtagtaactctcctttgtgattattaattcttaagtgttcatatatctgtcgtctttctttgtatgcttctttaccaacttcaagactgtcaagcattgtcacataactatctacttcctttccattcatatctctcaaattgggagaagttgacaacccaccataaacagcaaaaacaggtttattatccactaatgcattctcagtatatatcacatagtctagctccatggaatttgttgtgcgcagaaattacaacaggtattatctctgccatttctttaatagacttgttaatctcgttctttagaaatatattgtcgactgaagattccgattcatcaataatgagaatataagacaatgttaaatcctggattttttgaaaaaaattaaattctgaacactctccgtctgcaaccttaggtcttgactcatttagagtgcggttgttacaatagttaaaagcctctaccaaagtacattgcttattatatccagattttgcatctgtagcattagcataagaacgtgcatgtacttttattgtgaaatgttccacttgatcactgtgtataacacaagactactttattgaagtcgctatccgtatgaactttttctttattcacaggtacatgatacaaaacgatggttgaaaaacatggtacggcaaactttctttgcaataccacacacatccttcattttggcatttgtttctttgatgaattcattctctactatcatgttttgatatgtgccaattagcttcttcagcaaggcctttagcctttcatacgaaatgtactcctcaacaacattatataagtaacagtttctatcaaatcttttatgctctttatcagtttgtatgtatcttcaaactttgctatattgaatagtgtagcattgaaaagtactgttttggaataagcatttacacgtcctgcgtcattaccacaatcaaccaagccctttgtataatttcttagttccaccatgcctgcatttacagacttcatttgtacgatgcaccaacaatgtttctaaactacaagaaatatctaccaaccttctattgctcccttacacgaatatcttcctcaaacagttcaaaaaccccgttagataattctaacaattcaatctgatgtatatattttaccttatcgccatatttgtccactatattgacaaaagtataagattatttcgtggctcttttaccatcattatattcagtccagtagaaagcatttgaccattgctgaaaacttggaacaagcgcttcccgttctccttagacaacgccacctttgctttgtccataagacagtgtcgtaaagaacggacattcacttcgtctatgttaagacaaatgtagtttgtagaacattcattctctttaaagataccctttattcacatatcactaaaacagacggaggggaggattaaccattcattcgagtcttactatatataaatgagcttttttacacttgtcacctctcctgcaagaatttcatcactaaattttaaaatagcgtcattacataattgagaagacttgtcataatgcagtatcaatacagagcttgagaaatcagaaaaaatcccataaaactgctcaaacgtgatatacgttctcttgtcaggaatcaaagtgtgtatttctgtacgtttaatggcaaattcatcaaccaaagcatcatcattattacttataccaagtatgtgtccaccttctaactctacctcaattccagacaagacaacattgtcaacaatacaatttttgatgtcattgaattaggaaaggattactaatgtatagcagacttatcgtccgctatacatcttctcatagtacgactggtagtcaccagaagtcacattgtccaaccattcctgattgtcgagataccagcgaacagtcttttcgatgccctcctcaaattggagacttggctcccaaccaagttctctctgaagtttagtggaatcgatagcgtaacgtgcatcgtgaccgaggcggtcaataacataggtaatgagattaagggcttcaccctccttgcgaccaaggagacgatctacggtattgataaccattttgatgatgtcgatgttcttccactcgttgaaaccaccgatgttgtaagtctctgcaatggtacctttgtggaaaatgaggtcgatagcgcgtgcatgatcctccacaaaaagccagtcacgaacattctcacctctaccgtatatagggagtggcttacgatgacgaatattgttgatgaagagaggaatcaacttctctggaaactggtaaggaccgtagttgttcgagcagttggtcacgatagtaggcataccgtaggtatcgtgaaaagcacgaacgaaatgatctgagctggccttagatgcagaataagggctatgaggattgtacttggtcgtctcgtagaagaaatcatctccgtatgctaagtggtgctctgaactggatgctgtagtagtaaatggaggctcaatgccttctggatggttcatagtgagtgcaccatatacctcatctgttgagatatggtagaaacgcttaccctcgtacttatcgggcaggctctcccaataaagctttgcagcctgaagcaaagacaaggtacccatcacattagtacgggcaaagatgaacggatccttgatagaacgatctacatgcgattcagcagctaagtggataataccatcaatctgctcatcctgcatcaacttgtagaatgcatcgaagtcgcagatgtccatcttcacgaacttgtagttggggttatcctcaatgtctctgaggttagcgagattacctgcataagtaagagcatcgaggttgatgatcttatactcaggatatttgtttacgaaaagtcttacgacgtgtgagccgataaatccagcaccaccagtaattacgatattcttcataactatattattttgattttaatcctttatcaatcttcctcttctcttagtacgaaacctctcacatagctccaaataaattccataatgttatattaagtgatttctctgaatttccatgaacaccagaagacattgctgatgataccaatacatgatgtccatttaccgcctttgttgtatatctttaaatctccatacaaagttttctcaagcactttatcagtatatgttctgttaataataatacccttgttcttgatttccagacccaaataatccacacaaatggcattcatagcatccacaaaacgatcaaagccaaagtgcttgcaatactcatagaatgcgttccaaaatattttattctgatttgctttcatctagcaaacccaatcacagaaatgctccaaattaggactctcgaacaggaagtaagtcattacatgataaacgattaataggccttcgaaagccaatgccggcaataagggctctgtccctccaagagatagcaagtaccaacacaaagttccacaatcagtgttttgttcagttcgcgttccttctttcccttacggtattgaatgaaatagttatgattctctaccctcctctagagaagcgaatatgaaagtgcttgtaccagcctgtatccactttgtaatcagcatcagaagccacacggttaccatcttcaaacttaccggagagataacagtcaaaatctccaaactcacaatgggtaggattgagataatatcggctcaatgcaagtctcttgaaagtcatgtgaatgccgttctctttccacagtttaacaaggactgtagaatctgccaattgccattggtagttgttctcaacaagaacaacctttccaaaccaatcctgtttaaacggcatattaagctttgctcctgcctttaataaagctatcaatagcctcaaaagtagtagcagacacgccttgactttcagccattgggtggacttgaattcacgtatcattatcaagtgtttcaaatgattacagttcggggggattgcccttgaaatgctattgtcagtaggtcaaaaataaacttttttatgttcattacggtatatcctataaggttttaatgaggcggtacatcttcctattaggataggtcacaaattcatatagcgtttcatatcccatggaattatagaacccaacagtctgctcgttgtcatagtagtctgtagtaagcgacactcgttcaataccctccgtcttcataattcgttctgattctgccaaaagcttcttacctatacccattccctgagcatctttgctaacaccgatagaatacaattcagcatactcttcattatcttctacgctatctcctttcttcgtaagattctttaccaaacgaagcaaggagataggatttgtgaaaagcatctttaacgacagtaatccaaaatcaaagagattcgacttgatcagcctacgattgaatcccttacaaaccctagttgaagccgagaagccaagaattctaccttcatcttctgcaaccattgttatcgtttcattgctctttataaagcatgtgtaatagagcttcaagaattgaggaccaaggctggtcaggaaaaaacccttaaaggcactacaatgaatgcttacaatatcattaacatcctctatttttactttgcggatagtcataattatttaaaataattctaccaatttattagtcaatgcttgataatcaaaagcctctgctgtttttcgtgctctttggcacatagcctcatattcatccttcggcatagtaagtaacctgcgaatagcacctgcatattcatctgcatcgctaaataccttagcaataccgatgatgttcttctgtatcgggcaatacatcatttcaagattgcaacagataggatgaccacttgccatatattggaacatcttgctttgactacctccgtatgtaccaaactgtcctggcatataattcagaacattcacataactctttgacaagacgtatggcacatatttaggatcaatccaattctgcttgaatacaacattgcttataccctcatctttacatctcttttcgagcatgggtctatcatctccattgccgtagataagtatctttacattctccaagtcttgcaagcgtttagctgcatcaatcaagcttcctacattattggcaaaacggatagagccgatgtaaatcactttcttgatactatcattcctcagatcttcatcttccagaatatgttcactcttgaaggcatcaaagtcatgcagatccactccgttattgatatagttgacatgttctctgttaagtttacctccttgttccttataccatttccgatcactcaaatagtcaggacctccctcttgtgagaatacaagttcatcagcatgttggtattgcttatattcaagatggtaaagatactttatcactggatttgacgcctttgcaactccaagttctacaagcgagtttggccataagtcaagtacttcaacaatgtacttagccctggttttcttagctagtcgtgaaataacattaccaaacggaatcaaagcagtctgcacaattacatccggttttttgaacttctgagcaagcttaaccattcgccagtggaactgaaatgaactaatgatacgattgacaccattattatgatagttctttgcctttatgtgcacaaagtgtaaatcatcatagtcgcactcaatatatggctcatcaccctctatcaaatcgatatccatattgtgcataatacttgatgcaaaaatagttacctcataccctttcgtttgcagatattgggcaaacttgattgtacgaagtctcgactcatactgaggtggcatagcgtattgatttactaaccaaacagttttcttttcagccatgaatatctaaatattaactcttagaacaagttggcagtatcgaactgcatcgtttccgaccacctgtgcaacctgttatcctttatagtttacttaaactcatttaccaaacgtacaacttctgctacttcctccaacgtaatagcaggaccgataggtaagctcaactcctcatcggcgagacgctctgtgataggcaatgagagctgtggagtgttccaaacctcctttgtatagcactcctgtttgtgaggtggaataggataatggcatactgtacctacaccattctgctccaaatagccatgtagacggtcacgattcttcttgcccttcacgataattgggaagagatggtatgcgttctgctcgtcaggaagcagatctggcattgagatgagtggattgttaatgtactcgtagtagtagtgagccaccatcttgcgctttgcattgtcttcggtgagatacctaagcttcacatcaaggactgcggcctgtatttcgtcaagtcggctattgcgaccggcgtatttgaagacatactttttctggcttccatagttagcgagcgcacgaacggcagctgccagttcagaatcgttggtagtaacagcaccaccatctccaagagcgccaaggtttttacctgggtagaatgagtgtcctgctgcatctccaatgtttccggtcacgcgaccatcggtatgcttacaaccatggctctgagcgcaatcctccacgagcttaaggttgtacttcttacagagagcaccaatcttatcggtataggcattacgaccataaaggtgaacgatagcaatagccttagtgcgaggagtaatagctgcctcaatgaggtcgtcattaatctcaagtgtgtttggcttaggttcaatgttcacaggaacgagaccattctcagtgatggcaagagtagtggcaatataggtgtttgcaggtacaatcacctcatcccccagttgcatcacccccatctcgatgtatgcacggaagatccagatgagtgcatccaaaccgttggcacaaccgatagtatgtttacaaccgataaactcggaataatgcttctcaaacagctcgttctccttgccttggagataccagccattgtttataacacgagctacagcctcgttaatctctgctccatggagagcggttacgtccttgagggacagaaatggaatattattcattgttttatgtctttttctttttaatagtttatttccgaataatcatgtatgtttccttgtttatcacgaaactggaggtcaagagtaatgttatccttagtaatgtagcctttcatctgtgcaggattgcctatccaaatggtgttctttggaatgttcttagtaactacacttccagctccaatcattgcatgacttcctataatgagtcctgggagaatggtcgaaccagctccaatggatgctcctctgcaaatcttagtagaaaactgcttccagtccttgttcttggcacgaggatagagatcattggtgaaggtacagttagcaccaatcattacgttgtcctccaactcaattccattccacagctgcacaccacacttcacagtacaattgttaccaatctttacttcattctcaatcaagcaatgagaacagatattgcagttctcaccaatctgagcctttggaaaaactacacagaactgccagatattggtggattctggtatgttctcgcacatgcagtcggctaaacgatgaatcataattcattgcgatatttaaggaattcgtcataatcgcggatataatcctccttcagatacacatccgaagccagcaccatacatacggcaccagaagaaaaatctccgagatcacgccacattccaggttttacataaagtccctgatatgggcggttgaggaagaaggttcgtttgcatttaccgtcgtcaagagttacagtaaacgagccagatgcagcaatcatcagctggcacaagtcacgatgggcatgtgcacctctctcttcgcctcctgggacatcatacaagtaatagacacgctttacgtcaaatggaagggtctcaccattctgaacaacagtcaaattgcccttccggtcagaatgatgcttgtcgaactcaatgattgaacaatcaaatacattatatttttccatttgctttcaaaattttaaattgctcataatcgcgaatgtagtcatctgcattgaactttgtgtccgcaaattcgagggcaagcgagttagtggagaaattctccatctgccgccaaagacctttaggaatataaagaccgtagtatgaacggtttagtgtgaaggtcttcttctccttgccatcgtccacggtcacatcaaagcctccagagatggcaacaatgaattcagcagtctcacgataagcatgtccgcctctactttcacctccaggaacatcgtagatccaataagttcgcttgatctcaaaaggaatgtgattattctgctctacgaaggagagattgcctcgaggatcagcaaacttaggaagttctatgaatttcacgtcttttatcatcataacgttattttctaaatgtatcggaatcaacctcatgcttcttctcgtcgattaccttgagcaggtgttgtccatactggctcttgagcattggttgtgcaagttcacgcatacgctcttcagatatccatcccttgcgataggcaatgccttcaaggcaagcaatcttaagaccttgacgcttttcaaccacctcaacgtaggtagatgcctccgagagtgaatcatgcgtacccgtatcgagccaagcgaatccacgaccaaggagtgcgactttcaattctcctgctttcaaaaaagcctgattgacagtagtaatctcatactctccacgagcagaaggcttgatttcagatgccaccttaaccaccttatttgggtagaagtagagtccaactactgcataacttgacttcggctcctttggtttctcttcaatagagaggcagttaccttctgcatcaaactcagccacaccatatcgctctggatcgctcacccaatagccaaagacagttgctttaccattctctgcatcctctactgcttgcctaagcttagtagtaaaaccactgccgtaaaagatgttatcaccgagaacaagacaaatactatcgttaccgataaagtcagtaccaatagagaatgcctgagcgagtccatcgggagaaggctgttcggcatactcaaaatgaaccccatagtcagagccatcgcccaagagatgcttgaagttggggaggtcatgaggtgtagagataatgagaatctcacgaataccagccaacatcaatactgatattggataataaatcatgggtttgtcgtaaacaggcatcaattgtttgctgatacccttggtgataggatacagacgcgtaccactaccaccggcaagtacaattcctttcatactacttaatgatttatattttctattacatcaatatatttctttgcttgttgttcccaacagaactcttttattacagcctcacgacctcgttgccccatttcgtaagcctcctgtttgtgttcaaccagatattcgactgcttccttaatactttgaacattattcggatcaacgcaaatgccacaatggtatttgccattgatctttcgatacaaaggaacatctgcgaaaaggacaggaagagcagcctccatactttcgaagattttcataaccccaagggatccatcgcgaccttcaaaatctctgaacacattactaattgtagagcgaccaaatattgaaggaagatcttcaatagaaaaaccatcatggaactccacagaactccaatatggttggtcttttatccattgatatttatcttcaatttttcctataaggagatacttcacatctggaagttgacttagagcttcaaagaccttttcttgtctactaatgctataaattgttccttcataacaaactcgattctctcttgcaagatattcgctctcacttaatgagaatccttcattgaccaacgggaagtttgtcaataaatgaatgttgaacagtttgtatcgtctgacacattcatcaacaatccaatccgttactgtaaatacagcatcatatctcggaagatacttcttcagaaaatgattatagtattttgctaagggaattctcgcaatagcgggaatatatttcttcgaagcaatcaaatccggatagaactctctcagattaaaaacaacctttttacctcgttttttgaagtcgtcaacaattcctatcatttctggatctgaaatctgataaacatcagcatcttgctctaatgccaattgaagcacgactttttttgtatttaagaatcggtctattcgtcccttgggtttgaagcgagttgactttatctcaattccatccgaggttatctcatcaggctgatcatcgcatacaatgtatgttactttatagcccgccttcacaagactacacccttgcctggtggtcatcaagccatctgtacgaggatatacacctgtcaaaaaacagtagtgaatcatattatatgttttttagaaactgagcaaaccgtttgtaattcccttccgcagaataatgagttttccaaaactcccgcggagagtaattcccgctaagaacttcctctatagtcttgcaaatttcatctatagtaggattagaagaaagaagcatgcctacagaaggctgtactatttctgatgtgccaccaacgttcgttgctattattgggattccaaaagatgctgcctccattattgaaacaggcacgccttcatttgtactcatgttgataaacacatcaaagtgatgttccttataatagttcataacctgatcatgtgaaagcattcctacaaaattagttgtaagatgtgatttgcattctgacttagctttagcaaccaattcgtcaaatttttgccctccacccaaatgagtccattcaatttttttccccttaatagaattaagagcatcaaaaatcaaatctacacgtttcaaaggatatacagtagagcaacttaccactcttattgaatccttgtcctcagcctctttctgaataccgtaatcttttgatcctaatggataaacaactgtcttactctgtggatatttacttctataatattcctcacctttatgagagataaaaaccgcataatctaaacaggctgcttctctttctctcaatggtacataattcccacttgattcttcccataagtcccattcaccatgatatcgtgatacgaaatgagctctgccatgatatacaacagaaagaacatttgagcattttccccaataactataaaatacatcattagtattagctctcttaaatatctccttgatttgatttgacttcaataaaaaatttgaatttacatacgaaatcatccatgtctttaggcgagttctattggaaaaaagccttctcttgacaagctccttacaatacaagagaaatgtttttttgcaaaacatacctctcaaatacttatgaaaaccttgaacattacaaataggaacatttacatgacaattaaagggaacctccctttggatattaacattaccagtcaatggtataatttctactttctcgaattcctcacataagtatagtatttcatcttctaaaaaagattcaacattaccatatggaaatgatgatgtaaatagataaagggtcatatttatgaatagtttgaatagtaatgctgatcactgtgagcagcaacaagaagaaaaatccccaataaccacactgatgagtaaaaaacataaaagaaattgtcaaaggcaaagaacaatccaaaaatcaaaaacaacaagaatagtaaatcatttgtactcttatatctacgtaactgagtcattaagaaatctagaattgcccaaataaatattaaagaaccaagaatacctgtattggcaaataactcaatgtatgttgtatgcgagaaacctccatatcgagatactatgcaataacaaccagttccaacaccagtaaaaaagttatcaagtccaacattgaaggcatcctccatcaaatatcttcgtatatcatcttttacattttctgagcttcttgtgtacaaatagctgttagaatatatatcaagcaaatcacttacgaagaaggcacatacacatatagagattattataaatatgacttttctatgcgttggcttattgcgcaaatagcggatataaagtaatacagctatcaacggagcttgaataaacaggacttgtcttgatgcagtaaatagagcaacaaggaaagaaaccggaatcattaacaggaataaccactttaaaactttctgaaaaaatggagattgcacaatctcacccaaaacaaataatgcaaaggaaacataaaatgtataatacgccatagtattggcattaagagattggtcgttaagtctttcaccttcagctccaatactggtcatgtcaaccaatatatgagtgcttgcataataccatgcactaaggtaaagaacaatatatgacaggtaaagccagggtaataattttgttctcttcgcattaacagaaaatatgtaacagagcataattgctcctaagcaaactttcaattcagaaagggcaacagatttgttgatggcccaaaaatatgaaacaaaaacccaaaaatataacatagtaattatcttaaaggttttgctaacacgcagtaggccatatttcttaaagcttaataaaaaagcacatggaatcgcaaggtatagcgcaacactattcgcagatagagaaaatagacttgcaaatgcagcaaacagcacacaaaaaacaattactttatctgataaaaagacagaatccttctccatatattagacagctctaaattgtttgcgaggatacaaatgtagtattgttagaatgacacggactttttctatcataggaatatttgaggatttgagtacttgccaattcaatccttcaaacatattattccataatttgtagtattgatcttcatatactaacggataaagaattgctctgatagagtttttgtaaacaatgagagcgtcgggatttatatctttcccatcaacgaaattcatgataattttggtgtttgcagccaattggtcatactttcgagcacagctatcctttgaaataacttttgttattgatttattgttatagaagtacttatagtatgattgtggcatatatgacaacttcttacaattccatagcaactgcatagtggtcgccatatcttcgcccattgcaccttgtggatgtacaatattataataagctgttcctttgaacagcttattgcaaagagaccatggatctctttgcaataggcaactctctattagttgcttaggggtagatgcatgacaagcattgactcttttgctgttagatactccatcagtcatatcataatcgcatactacaacatctgcgttcttatctttcgcttcctcgtacatggcacgatacatatcagtatctacccagtcatcactgtcacaatgaatcacatactctcctgttgcattctgcatgccccaatttcgaacaattgcttgcccactgttctgctccatgcgatggatgttgacctgactcttgcgatgaggataattctcaagcacccgcttcaagatatcaatactcctatcaggagtactgtcatcaataaacagatactcaatatcatcaagtgtctgttcaaaaagacttcgagcacaacgctctatatatttttctaccccgtaaacagggataataatgcttactttgggcattctattcctttagtttatttaacaataataatttgcattcatttcgtttttcttccaaaatggcattcactcttacccaatcaatagattttgagaaatctacctcatcaaggtgttccgtatcaagaagacggtcctcaagatgaaagacctttaggagtgatgtgaagcgactcattcctcgttgggcattacctataacccagaatggtttattaaagataatcgagaacaccattccatggaagctatctactatagtcatttctgcatccacaaatgctcgaagccaagccgtaactcctgtgaagacacaatcttctatgcgcatcttcacatccttacgggtgcgattttctgcttgacatttaggaagaacttgaaatgcccttagtccttttgcctctgagactctttgaataaaagctgtctttttcgaagctggatctaggatgtagtaaaagagagtaccagctgcctggggttccttttctgcctctatcagactaatgtagtcttcctttgtgagaagcattgtagggtcaagtacatgaacagcattcacgccaaggtgatctttgcagagttttacacctgaatcctctcgaacagttacaagatcaaacttctgagcaagtggagaacatattgctgtctgctgtggggtaaactcccatttatcagttccgaaactagcagcataagacagtcttttcacattttgtcccttgacaaaatccaagaacattgatgtcagaaatgaattgtaacaaggcctccaacattggtcactacctacaacgtatgcactatattgtccgttttctgcttgagattgaaactcctgatatgaacgcagtggctttgtatgcctgatatacgtttcgatgaaatagttagtattccgccagatgacatccaattcacttttggaaggctgataccttacacctggattctttctagggaaccaagtagcaagaaactgcatcttcatacaataaagtctataacgcaaacttttaggcttgccccagtctattgtctccacatcatgtccagcacgaatgagtgtctgctgaagtgcatagttctgaagcaaaccaccataattggcatgaagcgattgggtaagtattccgattttcatgattttgctaattctcttttagcccgagacttctacctccatcaacagcaatgttctgacctgtgacgaagcaggcttcctttttacataaaaaatttacaacagcagaaatatcctctggctttccgtatgctcccatccagttagtcttaccaaggcgctctattacgtcctttgttacttcgcctctccgtactattccaggggcaacgccattgacagtaattccatattggcctaactcctgcgcaagtgacttgataaaagcaatgcttccacccttgctggctgcataatcactaaatccggccttaccttgaagaccaataacagaggtaatactaatgatgcgaccgtacttgttgacaatcatgaatttggcagcctctttggcacaaatcattgatcctctgagattaatattgagaatttcatcgagcacgtcaatgtcctgatccacaacattgtttgccttacctcttgcactacctcctgctgaattcacaagtatatcaatgtgtccttcattttcttcagctatcttctcaaaggtgctcctaattgatgaagcatcaagaacattcaactgaatagcaacagcatccttacctgcagcattaatttcgtcaacaacaggttgggcacttgtaggtcgtgctccacagacatagaccttggcaccttctgcagccaaacggaaagcacacgcacgcccaatagcgccagaaccgccagtaacaattgcaactaatcctttcaactcgtcatgctcatccactttaataatataaggacgagcaactctgaaagacgaataatgagaccgtaaatagttgccaatacgtccgtgaagattgattcttctcagtattctcttaaatatattcatagattacttcttgaacattctacttaactttccactaaccttttcgctaaaggatcgttgatcctgacttgcaacataatcattaatgcagtacctgtcttctgaaaggttagtaaatacctcaagcaacacaggggtatcaatgctctcatccaaaagaacttttactcctgcatccacttcgtctttattggtggctgtcagatacttgaaacctaatgattctacccaaccttttgcaaccttgttttcacctgctgcaagatagataggaaggtcggtagtagcagtatttctaggtctgtcatacattaccgcacctccctgattattaataagcataaaacgtgatttctttgacagatgacggatgcaaagactgttcatatcatagaagaatgacaattcacctgtaatatagaacagaggtttgtcgctatttgctccaaatcccactgcagttgacatactaccatcaatgccatttacaccacgattacagttaattcggatgctatccttaataggaatatagtgagccatacgaatagtctgactatttgccaactgaaggtcacaatttgcaggaagttgactcatcagtttagtaatagcataaagttcacaatactgcatatcaggaagcgttggcaggtcagcaattgccttccaatctgcgaagtatgagcccttggtcttactttcacaattttctacaagcatattaaagaaatatgcctcaggcatctcaaaaatatcagtaagagtatggaatggatcacaaactttatcttcaagacccacttgccagtgttctgcatttcctttcttgataaaagccttaatctcattattgaagatatagttagcaccaacagaaataacaatgtcaggttgtaacgctggtacctgttgctccttcataatgctcatcgtaatggtcgtattaatgatagcattctttgtatgacagttagacattttatcagtaagaacagctgcattatatctgtcagcaaaggcatcttctgctacttcaacttccatgagcggagtaactgactgaccccagatgatcattaccttcttacttttaagtcgagcagaaatgaatttccattctgaactatttatcggcagttgatgcattgtaatcttacgagcatctggtaacgattctacgctataagctgttccatgatgagcagcaaatggtatattaatatgaacaggtccacgtccatggtgagttagctctatcagagcctcattgataagtcggttacaataccattcgtcacgtggagtatcaataacagggagttgacaatgatattttgtgcaacctatgaaagtacttgcctgatcgtacatctgatcctcgcattggttgagcaactcaggtacgcgatcgcttgaaagaacaatcaaaggaagccgctggtagaatgcctctacgatagcacttccgtagttcatgcatgccgtacctgaagaacaggtaacagccactggttcaccacattcttgaattaaacctaatgcgaagaaagcagcactacgttcatctactacgagatatagcttaaacgatccatctgtttctaatgagttgatcagcttattatgacggcttcctggagaaaccacaactttcttgattccaaacttcttcagcaaagcaacaagctgaagtaccattttgtcatttacgtacatagtatttacttatttttgaatcttgatagaataggctttaatacggcattacgttcagtagaagtcaaaccaatgaagaaggttgacaatcctactcctatcacactaattgtaaccacactcaaagtggtgagaattgactgctctaacattatatgcattgttacaggaacggcagatgaaaccatcaaaacagcagcacatttaactaacacttctcgattgtaacgggtgatgctgagattaatgcttctgcatacaaaccaaatgcgtaaggcttgcaacacaattacaatcacaagataaacatacatagaatactcaggactacctccaagttcaaatgctaaccatgcaaaaggaagatgaagagcaccaataagtgttagcgtaatctggtaatttttaatgtttcctgttgctcctttagaggccgctagtaagctactaaacgaatttattaaagaaatcagaagtacaaggcgcatgaaaacaactgcatattctggtacaattcccaaccaaaccttcaacattgttggagcttcaagaacgagtggaattacgaagaatgctatgagacaaaatgccattttacagcctctgataatcaaattgtgcatttgatttaattcacctgctgcataggtctttacgacttgaggattaagggctacaaggaaattattcgcaaattgggttactataccgttgacctgattagcaattccttgagctgcattgactgccacggtaaagaacatatttattacaattgcgatgccttgtgtgtgaaggatataaccaagattacccaatacagtccagccagaaaaggaaagcatctgtttcatcattggtctgtcagcttttattgtgaagtgccgacattcttcgaaatgtctgaagccataataaacatacaccccacagtttatcatgccaataagcataatcaatgcagcataaaatatcaacttatcaaaaggagcccagatgacggcaaaggtaacaagtagtttcagaactgcttcaattatactgatataagcaaatgcagacatcttttcatgtgaaatgataaccgcattatatgagacagtaaagattcccaaaatggcagaaataatagagaactggtacacccaattggcggcttccagtcttccgtcaggaatattcatatagttatttaagaaccagagaccagcagtttctgcaattaccaatagacataatgctaccccaaaataaatatgttggcttgttgtgaatattttatttactgccatttgatcttttctgcccatctcaacattcaaaaaacgttgagtagcagatgccatagcgttattaaggaaagaaaggattactataatacctcctacgacattataaattccgtaatcatctactccaagttctcgcagtatcactctacttgtgtagagactaatgataagtagcaaaatcatcctgaagtacaacatcagggtgttcttcgctattcgtttattatttgctaatgtatctgccatttattaattcgtttatcttgaattatcttctctttctgttatttgatcctcttcttagatccttggaaaacttttattatgccctcgggcttcacaagcgttaatacctcatctaaattctgtttcgcaaatgcttcgtattcttgaatttcctgttctgccatttttcctattctatgcttatgctggtcgagtaaagatccacttctccctaaacttcttcaaactaattgaatttcagtaatttatctcgtttgataaaaaaaataagattactaattttcaacattttcaaatcctaaaatcaaggagtctgacccacattatctttagaaaaccttaatttagataccaattcgcctagttcctgactgattttattcgtatcctcaaagactgagattacaaaaccgattactgaaaagtacttttcagtaagaatggccccaccacggttatgataataaacacgcatacgcttaaattactagataaaaatatgaacatttctactagtgaggtccctatgcaatttactctttatatattcatgcaagcctttgtgtctatatcacaggggggaggtacttcatctgtgcagatataatagttgaatgtatctgacagtttttaacatggctttacctctatttctttcacaaaggtaaccgaagaattgacactacaaattccgatactaacaactagattttttctgaaacaaagcaccacattcgaaaagtcggatgataatttttgcaccttggaagtaagaagtacggatatttacacacaacttattacatcttttgggaggcatcaacaactaagggttgaagctcaatattgaacaatatatttattgattcttccatcacttcctgctttttagaaactgcagaaggtttacgataagaggggacgtcccaaacaattgcacattttagtataattcactcgcactgttttacagaactcttccaaattaattcaccatattcattaaagaacaagtgaaccttggaggcataaaaggctccttctttgcttctacgattcatattccactacgcatttaaattcgccgtgaaagtaaatgtataattaaggtatgtcaagaccatctaaagtgactattttccactatcatcggagcgatctatttgtttcccttgaaggttttctcactgttactagccttttcaccacttctgtggtttacgagaatcaggctaagataaacgccagattgtttcccgttacgaaaacgcaatataccatctatctcagttagcagaacatggctgtgtttatgccaatacccagaatcgagattaagttagcataagtgtcgcgatagcattctttctgggatagatcacgaacctaccatgtagcctctaagtaagttcttatggaaaagttcaacctgttctaacaacagatccaaactattacaattacaggaaagcaagaccgcatcttcacgtaaccattaactattgggacttgaaaaacaatcaggaagcatgatgccgtttgtataaagttgatgttttgcacaagctttataactgcccaactgcatttggaacgttttacgaatacggactacgagtcgtccagagtatccttccagcgaatatagatactttgtaaagttctctttcaaggcttttaccagtttctaggaacccacaaggtcggatttcatcacgttttcatactgcgtagtcggagcatcagctacatgaacaatcatacaggcaatatcatattcctgcaaagcgtaataagtgaaggaaatactgaaacctgattcataaaccaccaaataatgaccattaggataatatttcttcaaatattcaaaaaattctttggcggcagactattgaaagacctagtccatcgtttccgccaaatattttagatcagattctgccacaaccccatcttttaccttcttaacgatagcatcaagcatgtctccacaggtatagtcaggactatacatatcatcaaagtggcaataacgctcatccttaataaaatgatacgacagactttcaaggatttcatagaagagcgtgaaagcctcatgatactcccttttatccaacaattccccgatttgaaccttatttggtgcaagcaatcccgcaatcttgtcacagtcatcgtctatattgcttggattaaagactgcttctattttctctttcaaaggagccttctccacatccgtgcgcatttgcagttttgcttctatgcgtcacaatatatatcacagcttttcacttggcatagttgtaatatctctattgatcagtattccagtcttcccaacgtccttgccaagaagtccattgttgatttatgttagtgttatagattattctaattctttatctagaacctcaaaccgcggtgaattcttggatttaaattccggtaccactttcttcatcaacctcaccgtatccatgatctttactgtacgcgacaacttctcaaactccgcataagtgtcaagaatatcagcatattcataatgacgtaccttagctatcataattttcttattttcagtaggaatcgtattctccttatcactcaggacttcctcataaagtttctcacccggacgtaatcccgtaaactttatttcaatatcttcacccggacgataaccggccagttcgatcatacgggtagccaaatcaacaatcttcacagccttgcccatctcaaagacaaaaatctcattgccttcacccatagtggcagcctccattaccaggcgacaagcttcgggaatagtcataaagaaacggatgatatcgggatgagtcactgtgacaggaccaccattctcgatttgttccttaaaacggggaattacagagccgttactacccaagacatttccaaagcgggtagtgataaatttggtatgacctttcacttttccctcacgaatagcacatcccagactctgtacatagatttctgccaaacgtttcgagcagcccattacattggtcggattcaccgccttatcggtagaaaccatgatcattttctcagctccgtattctacagccatatcagcaacctgacgcgaaccgaccacattgaccagcacagcttcacagggattttcctccattaacggaacatgcttataagcagcagcatggaagattacctgagggtgatagatatcgaacaccatacgaagacgctctttcacgcggacatctccaatgacaggaacaaaatcaagaccgggataattcttctcaaattccagacggacattatgcagaggtgactcggcagagtcaaacatgatcagtttcttgatattcatctgagccaattgccggcaaagctcgctaccaatactaccggcagctcctgtcaccaacacaaccttgccacaaaactcagtcatcacctcctccatattaatatgaatttctgagcgacccagcaaatcctcaatcttgataggacgtacccactggtggaaacttccgttttcgtcagcctcactaatactcggagctatcagtgttttcaacccgtttcttttacaatattgaagcaaacgtccttcctcttcacgggtattctcatagcgggcaaacaagatgcctccgatacatttcttacgaatcagtttattgaagcaatcttcatctttaaaagaataaacaggaagatcagccacacgccgaatagaattacctgttccgtaaatacaaaagcctacaactttataatgagaactgttcagtaaccggactttcaatgccacactcttatcatcaataccataaatcagaatacgcatattctttttattcagtacattcagcaagaattcataaacaataatcaactgtatacgaaacccaaccataacaataaaagtaagcatagcatcaaacagtacaaaaattattttctgactgttatgtaatcccgtctgtggcaggagaaaccaaatgacaatggctatgcagacagcctttatgagcacacttcccgccaacctccataattccttcaactgggaaaaacgaatcgtattacgataagtatgaaatagagtagcccccaaaacactcgatataactgaaaccgccaagatatggaaaagtgaaactatttctttggaagtttccgtaatataatgaatgccaataaatgacacccaagtacacagtaaagctatgaatgtatcgattcccaatacaacccaatagctaaagtagtttttctgtaaataatgaataaaacggtcaaatgcgtgtttcataatttaaatcccccaattaattatcatatattcttacaacgctgattataaacaactagaataatagtatataatcgtacataattatattatttctatcaaatcaggatttacttctacacccaccgaaaagaaattaggcagttcgacaagaagacgtttgactttagagccacgggtagtaagcagacgaccttcataaccttcaaaaggacctccaataatacggatcatacgaccatacattgtatcgcttatctcttcaggtaaataatatttaggattttccgaacctcggacagcacgtataaaacgctccatatccaaatcggcaaccatcataggctgacaataaccgccacctttctggtaacgatattgaagggtcggtattttacgaacaaacagatctagaacttctcttgtatcgtggataaaaagcaggtcctgcataaacggtacttcttcacggattcgtttgccatttttcaactttaaccgccattgcataggagtaaatacttctagatgttcatcactgagctgcttataagcaggcaatttagcattgggacgtttgaggtcacgcattacataccaatgcatccgttgttcattcttcagaagcgccataaaacctcaagacaattattctagtcctgcccgatcatatatagaactatatatcaagcagttacaatcaaattctacaaaaataagagattcctccccgttattatcagactgtttcatcttcaccatacaagatgcattcaaggtctatttacaaccttacttcttatttctctctataagagaaatactaacgggcacaaaggtacgtaatttattggaaataacagcataaaacagatgtaattttgggtaattgcttcttctagagaaggatttacttaacaaatgtttaattatcattaattatataatgattataattatctgatatataagatgttaaattaaaacttacaccctgttatttatcttatagagagaactatattttgctaagcaaatttagtttatatcaatattatcccttcttgtagtttctctttaataaccagcacgatatcattatagaattaagaatgatatataatgactattaaatcgtatccggatcctgttttactttgttatatccttactttaggaaagttttaatgtgcaaaaaaagtaacagtaaatcatacatatcctttgatacatatttccgatttacagtttcatggctatatggtagattatcttatctctacaatgatttaagaataagactatttgccttatctaccaaagaagtatccaatgaggcgagataaatgcgggtagtgttctccgagtcgtgtcccatagcttcactgataacagacaaggaaatatttttactcttggcaatgctagcccaggcatggcgggcaacatacgtagttaaaggtatagataaccccaaccgcatcccaagttttttcagtttttgattcaccaaatgggcagttttcttgtactgtttccttccgtctacctccatatctcgtataataggtagcaggtaagggctcccctgagtatcatacctgtcaattatttcttgcattggcttctcccatttgataaataattgttgccccgtcttctgccggcgataagacagaattccgttctgcaaatctttctttctcaaaaaagccatatcaatgaatgacataccacgggtataaaatgaaaacatgaaaatatctctcgcataagccagagaaggactctttgtcagatcaagttcctttaaacggcgaatctcctctaacggaatagcacgtttgaccgtcttgtctatccctgtataaacatatttaaaaggacttcgctgaaccgtcaagcccttctccacagcacgattataaatagcccgaagattccgcatataataagaggtggtattcggacaaataccggtagacttcaaataactctcatatttcatcatcaaactggaatcaacttcttccagcaggacatctttccctttccggaaacgtacaaagctgtttaatgtagtcatataagtttcagcggtacggtgtttgccaatttgatttaactccttgataagatgaagagtaaaggatatgaaaccactatgctctgtggatgcacaataaagttccaccaaactatctgaagtataagcaatgcctgaacgctcaagacgggtaataatattcttcagccttacactatcctccaacagagaatttttcaaagaaagcaagtaatctctccgactttcactggttaccgaagacagaacaacctccgaatgtaccgcgtcccattccgcaggaaacaacttgtatccggtatgtatttgtcttactatacgcttatgaatcacttgatagaaaagtgtaccttctttcgtagcgacggaagatgcacggaattttacttttactgttgccatacaaaattatttctcaaaatcaatataaccaaacgtaaactcatagatattgaatgatccgaataaaacgttttatccgaattttacaataaccactctctataattcacattccactatttcttcactacagaacatacaattatcgaaataacttgccgctttaccttattttaataactaattcttattttttatgcaatatgtaacactatcagcgcttaaaacaacaccactaaatgcaaaaatccctcaataatctactgattatcaagggatatccatgtgaccccggtgcgattcaaacgcacgaccttcagaaccggaatctgacgctctattcactaagctacggggccattctttttatgcgaggacaaaagtataaaaaatcttctcatcttcctaatgattcttctttttttatagttattaaggtacccacacctgttaacactctgttattttgaaatgctttatagcacatactttatcaatttgacaatcttttagagaaatctcaatacatatatcatttttattcctatctttgccgacaattaacatttaacaaacctatgagttacttgataaaacctaagaactacaaaccgcttctcgacctgaaacagaccgagctgggaatcaagcaaataaaagagttcttccaattaaacttatcatccgaactacgcctgcgacgtgtgacagcccccctgtttgtgttgaaaggcatgggtatcaacgatgatttgaatggaatagaacgacctgtttctttcccgataaaagatttgggcgacgcacaagcagaagtagttcattcactggctaaatggaaaagactgaccttagccgattatcacattgaaccgggatacggtatctataccgacatgaacgcaatccgctccgacgaggaactgggtaatctacattcactctatgtagaccaatgggactgggagcgtgttattaccgacgaagacagaaacgtaaacttcctgaaagaaatcgttaaccgcatttatgcagccatgattcgcacagaatatatggtatacgaaatgtatcctcaaatcaagccgtgcctgcctcaaaagttacatttcatccactctgaggagttacgccaactctatccgaacctggaacctaaatgtcgtgagcacgctatctgccagaaatacggtgccgtattcattatcggcataggctgcaaactgagcgacggcaagaaacatgacggccgtgctccggactacgacgactacacaacaaacggcttgaacggcctgcccggactaaacggcgacctgttgctttgggacgatgtactgcaacgttctatcgaactttcgtctatgggtatacgtgtagacaaagaggccttgcaacgtcagttgaaagaggagcacgaagaaaaaagactggaactctatttccacaagcgcctgatgaatgacactctcccgttatctatcggtggaggtatcggacagtcacgtttgtgtatgttctaccttcggaaagcacatatcggagaaatacaggccagcatctggcccgaagatatgcgcaaagaatgcgaggaacttgatatacaccttatataattgctatgaacgtacagatagaagaaagttggaaagcacatttgcaaccggaatttgacaaggactacttccgcacacttacagaatttgtaagaagcgaatatagccaatatcagatatttcctcccggaaggttgatattcaatgctttcaacctttgtcctttcgataaggtaaaagtagtaatcatcggacaggatccgtatcacggaccgggtcaggcacacggactttgtttctccgttaacgacggagtacaattcccgccctcactggtgaatatattcaaagagatcaaagcagatataggaacagatgctcctaccacaggaaacttaacccgctgggctgaacaaggtgtactgctgctcaacgcaacactgactgtacgtgcacaccaagccggttctcatcaaaaccgaggttgggagacatttaccgacgccgctattcgtgccctggcagaaagcaaggagcacctggtgtttatcttatggggctcgtacgctcaaaagaagggagctttcattgaccggaacaagcatttagtgcttacctctgcacacccttctcccctatccgcctataacggtttcttcggcaacaagcatttcagccggacaaatgattatttaaaggcacatggagaaacggaaatcaactggtagttgaatacaggttgagagttgaaaaagaaaatggctgcgctattacctaatgaatagcacagccattttctttttccataatattacaacaatgcaattatatatctttcaactctacgcttatcctagtaccactggatattactttgcgtctggcttctctgttcatacttcaaatcctgaagaatgcttgcatttgcccggatagtaacattataatatctccaccgtccgaaaggtgaaagactggcggacaagttgaaacagtgcaaatcacgggaaatcgtacaagaagtttgtgtgatctcctttgcctgaaagtcgtaaccggagttgaatgaaagcgaccagttattggatattttcacgtttccgttcgcgttgatattatgtgtatacgtataaggatatctcatagagtggcggttaataggcttcgttctatcttcacggatattgaacgaataactaaaactcaaagaccaaggcattttgaatacctgataaccgtccgagtccgcttgcgcattctcgaccttcttagtgacagttccgtcttcctccgagccttccgaatcttcatcatcaccttccggcttcttcttatccttatcttcatcctctttcggtccgaaccacttcttccaagtatcattattgaaagtatagttaaatgaagaaccatatccctggaaacgtccgaagcgaccatacgaccactccgtccggttaccggtaactacattaccgcttttatcaaaagtataagcatacgtagcaaatgacgcattcatattaaaggtataactcttggtcaacttcaaacgcagatttatgctcaaatcactccacggccgttcctttgccgccatattataagacatatttgcactcaagtcatcaataaggctcactttcttgaccgtatcttcttttgcatcgtaatacttcatttccaagttattggcaatcgagaaactgactgttcccgaaccttcacgggaaggaacgccataaggctgtccggtaaaaggagaataatattgtgtatcaccattataatcagtatactcctcccaatacttgctaaatcccggagcaccgctcaggctaacttgtggcgtaaacacatgacgaatctgtatttcctttttcttcatgaaaagaggtttgtacataccatacaatttggtgctcagactcaaacttgccgaatagttggatacccggtagaaaccgttaatcgtatcgcccggcaatgcctccagtctacgcgtttcctcattatattgctgatttaccttacgggtataccaacgttccgtataattcaccgaaggattaacctgcaaatatttgaacagagtaaaagtagcgctgatagggatattatgattcatcgcattttcccattcgctcagtccggctttgaacagacggtcgtctttcgtacggatactgtttgtcagacgtcctgtatagctaagagaaatcttttcataccagcgttcttccccggccgctttcttgcgtttgaacgggaagagacggctcaacgatatattcaagtcgggcaacgtcaccgcaatggaagagtcacgcatggtctgtgcgatattggtcgttccggaaagcgtcagaccgatatcagggaaactgcgtgaataactgatacttgatgttttggtattctgagtcaacaactgtgaattataaaggttgttgatatttgaacgttcgtagctactggtcgagaagtttacactggcagagaaagtactgttcggactcgccttggcatcctggcgatgattccagacaatcttaaagtccttggcaactgcataatccggcatccctttgtcccccgtcttagtgacctgataatccgcttgcagcgtaccggagtatttatatcgtttattatagttggtcaatccggaaagtctccacgaacctttggtaaagatatctcccgtcattttcaggtccatgatgtcactgatagcaaaataatatccgccttctgccagaccgaaaccgcgactggagtcgtccatataagtcggcatgatgaaaccggaagaatagctgctggagaacgggaagaaaaagaacggaacagccaacggcaaaggtacatcttccaccaccagataggcaggtcccgtcactacattctttttaggacgcaccttggcccttgtcaactgcatatagaagtgaggatggtcatggtggtcacaagtcgtatagcgcccatgctccataaaaatttcatcattggcccccttcttggctttgcttccggtcacgtatccttccccctgttgagttacgatttcggtgattcccgcttttttagttttgaagttataccggatagtttccgtatcataagcggtatctccctctttaaatacaggtttacctttttccactcccaaagagtctttgataccgtaggcgtgcaccgtgctgctatccagattcattgaaataacttccgctgccaactctatattctggtaattaacttttccgctaccatacaacgtagcggccccgcccaaagtaaaaactgtggagtcgttagattcataaataaccggtgcgtcgagcggttgtttcttcttagccggtgcgatagagtccatgcgtaccgtaaccgtatctgctttcaatgaatcatttccgtgaagggaatcattctgtgcagtattgggggcaatcattcctcttcttcgacgttgagacgtagcctcatcgggaagcatcagtaagacaatcagcagtatagatgatataagtatttttgctttcaatggcgccattaactaatagtttacgcttgaagtggcaaaagtacataaacttcaccaattatgagttagaatcttcgttatttaattattttttagtgctataaaaagagagaacaccatctgtcaaaacggcttaggccttcttcaccatatttagcaatactatgacgggctttctctaccgacttttcctcgtccaggtgagtcttagaaaagaatttatcggcaaagcagattaactgttcttccagagttatgggcaacatctcgcgatggggtacaggaagctgctggtcgacaatgtcctgcaaggatagtccggcccctgtatggcgttcacaaaccagtgcgtgctgcgggaaaccttcttcacgcaagatttcagctcccaaataaccgtgagctatataaggatgcgaaccgaaacactgaatcgtaggcgcatcggtctgaaaaataccgatatcatgtaatagggcggcttctttcacgaaactccggttcaaacgtagttcgggatgcgcatccagtattttcatggcctttccggccacagaaagactgtgtattactaagatttgccgctgctccgtattgtccggataatacttatcaatgatttcgtatggattcatgtgctctattttttgttctcttgatgagaaattaatatttttgtgcaatattacaaaaaatcaccgacatgagaaatagaacttccctcattcttttttttctgtttgttacagtctttcctgaatgcattagcggcaaagttgtcgcaggtgccggacgcttcgaacaatatctgccgttcattcaaggcaaacgtgtcggaatggtggtcaatcatacctctgttgtaggaacggggcagactcatttgctcgacactctgttgaaacagcatatcaacgtagtcaaggtatttgcccccgaacatggtttccgtggaaatgcagacgcgggggagactgtgaaagacggcaaagattcccgcaccggagtcagtatcgtctctctttatggaaacaacaaaaagccgactgccgcccatctgaaagatatcgacgttattttattcgatattcaggatgtgggagcacgtttctatacctatatcagcacaatgtactacgtaatgaaagcctgtgcagaaaacaataaggaaatgattgtactagaccggcccaatccgtgcgactacgtagagggtccgatactcaaaccggcctaccggagttttgtcggtatgcttcctatcccggtactccacggatgcactatcggcgaactggcacgaatgattaacggagaaggctggattgcccacaagaaaaatccttgttcattaaaagtaattccagccacggggtggatacacggagaaccctattcgcttcccataaagccctctcccaacctgccgaacgatcagtccattcgcctgtatgcgtcactctgcccgtttgaggctacccgcgtcagcgtagggcggggaacgacatttcctttccaagtattgggcgcacccaacaagaaatacggagattttactttcactccccgctctctccccggttttgacaagaatccgatgcacaaaaatgtagtctgctacggcgaagacctccggaacgcagacgatgtgaacggatttacactccgctatttcctgcatttctaccgtttatccggcgaaggtgccgctttcttctcccgtgcccggtggtttgacttgctcatgggcacggatagtgtacgcaaagctatcctcagaggcgattcggaagagactatccggaatagttggcaaaaggagttacaggattacaagaagatgagaaacaaatatcttctttatgaataaaaaacaagtatcatactttcattctttttcataaatcacttataactaaagctataagtatgatagataactattatctccggtatctatcatacttatactattaaaatgaagtatctattttacctccaaaggtacgacatgataatacgtaccatacgttttccgcctggatttcaccccaagccgttgcaagatacgtccgaaataagaagcctgtctggcagagaatgtcatcttacttgctttctgaatccgtcgcaggatgtcgatagccaacagccattcaccttcctcctcttcttctgccccacgataataaaccataaacagctgttcaatagcgggtgattgttcaaactcacgattgttttccgtcatgatagcctcttcttcggagtcaaaccaataacgttcgttatgataaagcagttccaacgcctgtgcatacaattgttcataatcaatgggacgcgacacatctatgcctcccgtcatataaatgccgatgaaacgacggctaccggaagtatccgtcaacaaatcccgatgattgcttgtagcgatgaacgaagcataccggcgaagttcttccaccgccgaagcattcggacggcgcgtgttcaccaccggtttttgcagaatatgcttcagaaaagcctgctgggtgggacttatctggtcgaactcatccatattaataagcaaaaagcgattcagatacaactccgcatcccgcttccgactgaaatcaatgctgtccgtatagtacgcctgtaaagcaggaggaagaagcattctgcaaaaagtggacttccggtatgcctgcgggccaatcagcaaaggcgaagtgctgttcgcatgtcttttatccatccccatccaatgggcagtcatgctcaggaaccatcgccggaacaacggtgcccagtgccgattatcacagggaacgcggttagccagttccagaatccggtctttaccatcccagcgaggcaagtggtacaagaaatcctccacaggatgatagataggcacatggtcggaatccagataacggatgacatccctgtcccacattttcactccttcacacatggcgttcatcgtaatactcgccaatacccgcttgtctaccgggcgaaaatagaagttgaaactatgccgttcgcgatattccacctccgtggtcaacgcattgtatcggaattcataacgacgcttcataaattcatccatctgcatggcgaaaagctgttcggccgtcaaactgctcttctttccgaatcctttggcggtccggtatacacttttcaccgtttcgcgaatcagcaactcgtccgaagggagcctgtaatgcgccttcgtccaccgcacggtatcttcttcgggaatacccgcccggaagcaatgctccgccagacacaccagcaacggttgtatatcgtctccctcccgatatccgtccagttcctcaagcgccctgttgaatgcagcggagaaaagcaccgacaacgcttcatagttctcatatccgggcgccattcgttgcaaaggagaatcggtttcccgcgttcgcctgatgaaagccgtttcggagggaaggctgacgggctgcttcatataaatgggcatcgcttccggattgaaataaagttcgggatcgtacgtcaaccgacaatattgttcgagcaacggttctttcagttcaatatcaaaaggcagttgcggctgataatatttcacggccgtctgataagcatgcgcatgaaaaagctctacctgctcgcgtgagaccggcaagcgatcgtccggataagtgaaccgtacccatattttgactgatttaccggaggagcctgtgaaagcgaggaacgtttgcggaaactctttgactaattcctttatctcgtcggcttccgtccttcccgaaagatgattgacttccatcatcactatgccgttatattcgttcaaagtcatcactccttctttacggacaaaagctgcggcaggaatcactttgggaaccttacgcacgccttcaatcgaatttcccggaagagtatatctcaaagcttccctcattttggagacaggttgcgccttgacttccgttttcatctgctccagaaggagctctattttcaacgtccgtaaggtatttaccttgccatcgtctctgactaatgttattttcatctttttttattattcattctagtaaaagggaaagctgcactataactatacaaagatacaacaagcacttcgtccaaacaaatttccgtatctttatttgccgcatcatacggctttattttacagaaataatacttactaaatttgcaaataaagccgggataatgtatctttgcaggcagtaagacttcagcccgcatacgtgtgccgtacagcccatgtatgcgggctgtgcagtttacattcgcgggctgtacagcccacaaatgtgtgcccgaaaaaagcagctgctccaagctgattattcaggcagcagaggtaggttatcttactgcaaaacaagcattagagcgcctttggaaaggcatttcacccacattaaccaataaaagaaaagagatgtacgcaaagtatgattttcgcaaaaagccgtcttcaaaagaagatgaagataaacagccgttgtatccccgcatcgtatcgaacgggactatcgactttcaacgcattgtaaaagagatcgcccaggcttccagttttaccccggcagacatcgaaggagttcagctggcgattgaaaataaaatatctgaatatttaatcagtggttatcacgttcaattgggcgacctcggatatttttcagccaagttgaaagcacgtccggtaatggatgccaaagagatacatgcgcagtccatctatttcgacaatgtaaattttcgtccttcatcttctttccgaaagaaggttcgcggatttgtagaaaaagcgaagtcgggatttgcacattctgccgaaattccggtggaagaacgtcgtcgcaggttggagagatttctggatgaacgtccgatgatacgacgcaaggaatatacgcaactgacgggactcctgaagaacaaagcgctgaatgagttgaacggttgggtgaaagaaggggtactcgacaccattggaagcggtagccatataatttatgtgcgggcaaatactgggaaagattaaacaataaaagcagtaaaacagaaatgacagatgctcatttttcatgaagaaagtatgatagataccggagttcggaatgatctatcatacttatttatcaggataccagcatattagcaaaaaggatgagagtcatgaaagttattttttgccctgaagattcttcttcaaatttggtggtaatttaaccagtcggtggtatctccattcccctccttcgggaaggaggggtggctgaaagccggggtggtaggtggatacacaatgctgataataaccgacttacgcattcacctaccacctccccctacggggactcctccttcccgaaggaggagaatggagaatactatcgactatcaaattattgttgaatactatcgattatcaaattattattttcctaattaattttaccaccaaatttgaagaagaaccgccttgagaaacggtacagttggaaaatagcggcgaaaatcgtgacagtagctcctaaatatcagttattcaccgatggagctacaatgtcctgcaatcattattccatttccttctttctcttcttccacagttgccacgaattaataatattttgccacagcacatacgatcccggagcaacagaagacaacggattgagataggtatgtgccatccaaatagccagaatcgtattcttctgccccaatgcctgaccgccactgatacggtcattatagacagagccgattgttttccctaagaaaaactgcaaacaacaagcaaccaaagccccgactgcaatcattatttcggtaaagccgtccgcagggtcattcaacagcgaatacaacgtttgggctgtaacaatagccagagagactgcccacaaatagaaagcaagttcatgatagcccaacagcttctgatgcactttcggcagacatttgcccaacagccacgcagccagaaaaggacagatcaataatggaaatactttactcaatataacaaagaatgctccccaaaaactaacatcgggatgtacttccaccaaaggaaaaaaaatagggacggcaatagctgctccaatattccccagcaatgtgtaagtagtcagactcgccgcactccctcccaatttggaagtaatcactgccgcagcagtagccgtagggcagataatgcaaaccatgaccccttccgccacaattttattgaaacgataaagcagcaagtaagcagccagcgcccccacaatctggatcaacaacagccatgcatgaagtggctttggtttcaaatcatgcggagatactttacaaaaagtgagcagcagcatcgtgaatatgagataaggagtcaggaaagatagactgatgaacaaaggataccccacagcgcctaccaacatagcgataggtaatgtccaattctttaaaaacttaagcatcggcgtacattttaacttcggggtgcaaagtaacggagatttcaggagaaaagctacctttaaaccgaaaaaaacacaaaacttaatggcaaataatgagttttctacaaaattctactacatttgcagcgtattacagatatgaaactgaatagaccatacatattatatatatgcatttgcctctggctacttttcctgccctcatgcaccaaccgtttatgggggaaagatttcgtcgtagtcattgatgccggacacggcggacacgacccgggagctatcggcaaaatctctaaagagaagaatatcaacctgaacgttgccctgaaagtaggaaatctgataaaaaagaactgtgatgatgtcaaactgatttatacgcgcagcaaagatgtgttcattcctctggcacgacgggcggaaatcgcaaacaacgcgaaagccgatcttttcatctccattcacaccaacgcactggcaaacaaccgtacagcaaaaggtgcttctacctggaccctgggtctggccaaatcagaagccaacctggaagttgccaaacgagagaatgccgtaatcctctacgaaagcgactacgaaacaagatatgccggttttaatccgaattctgcagaatcttatatcatattcgaatttatgcaggataaatatatggagcagagcgtgcatctggcttcactggtgcagaaacaattccgacatacttgcaaacgagtggaccggggcgtgcaccaagccggattccttgtattaaaagcaagcgccatgcccagcattctggtggaactaggatttatctccactcccgaggaagaacgttacctgaactcggaagcaggtgccaatacaatggcgaacggaatttaccgtgcttttctgaattacaagagagaacatgaactgcgcctgacaggagtcagcaagacgattattcctgccgaagaacaggaggagaaaaatgctccggtaatcgcacaagcttctccccagcctgccgtaacagcgaaaacaacgcccaaacgtcctattgtagtagaaagtgcaaccaatgacagtgaaattacgtttaagatacagatactcacctcttccaagcctctcactaaaaatgacaaaaggttgaaaggactgaaaggagtggactattataaagaaaaaggaatctataaatatacgtatggtgcctctgccgactataataaggtattgcgtacgaaacgtagcatcacggcacaattcaaggatgcctttatcatcgctttccggaacggcgagaaaatgaacgtcaacgaagcgatcgccgaattcaagaaaagaaaaaataaataaaaatataaaatgaagtacattacaaaagaagtcagaataggtattgcaggtataatagcactatgcgtactgatttatggaattaattggctgaaaggtatacacatgttccagccttccagttatttctatgccaaatttcaaaacgtaaacggactgaccaaatcaagtccggtatttgcagacggtgtccgcgtaggtattgtacgtgacatctattatgactacgtgaacccgggaaatgtgatcgtcgaagttgaactggatacggaactgcgtatccccaaaggaagtagcgccgaactggtatccgagttaatgggaggtgtgcgcatgaacatccttctcgccaacaatccgcgcgaaaaatatgccgtaggagatacgattcccggcaaactgaataacggaatgatggaaagcgtggcacagctcatgcctaaagtgcaggaaatgttgcccaagctggattcaattctgatctccctgaacaatattctgggagacaagagcatccccgccaccctgcattcaatggagactaccaccgccaacctcgcagtagtcagctcacagatgaaaggactaatgagcaaagacatcccccagctcaccgggaaacttaatacaatcggagacaacttcatagccattagcggtaatttaaaggaaatagactatgcagctactttcaaaaaaatagacgaaactttggctaacgtaaaaatacttacagagaaattgaacagcaaagacaacacgcttgggttgcttttcaacgatccgtcattatacaataatctgaacgcaacgacagagaatgccgccagtttgcttgaagacctgaaagcacatccgaagcgttatgttcacttctcattattcggtaaaaaagataagtaagttttcatcgttatatagatttcatctaaataacgagagagcgtaaaaagaatgtggatcactctgcaaatgtctatctacaaaccgaaataatattcccgtacaaacagataaatgaaagaaaagctacataattcagggatataaaaagctattatacagatacttataaaaatgcaatagccttcagaggcatcatgtttttatagaaatgtataaatcactgaaagtaaacacattattgttttcatgaaataaacaagaaaaaatagatttgttttttccaaataagattccgaattttgcaagcgtagaagttttgcttaattaataaatgtattaaaagttactatgattgaatcaaatcatgccgtactttggaaccgctgtctcgaggtaattaaagacaatgttcccgagacgacatataatacttggtttgccccgattgttccattaaaatatgaggacaaaacattgatcttgcagatcccgagccagtttttctatgaaattctggaggagagattcgtagatctaatccgcaagacattatataaggtcattggcgaaggcaccaagttgatgtacaacgtcatggtcgacaagacttcgattccgaatcaaaccgtgaatctcgaagcaagcaatcgttctaccgctgttactcccaaaagtatatttggtgccaacaaagcacccaatttcctgcaagctcctgctgttcaggatttggatccacacttgaaccccaactataactttgagaacttcatcgaaggatacagcaacaaactgtcaagaagcgttgccgaagccgtagcacaaaaaccgggaggtaccgctttcaacccgttattcctctacggagcttccggagtaggaaaaacgcaccttgcaaacgcaatcggcacgaaaatcaaagaaatatatcccgaaaaaagagttttatatgtttcggcgcatttatttcaggttcaatatacagactcagtacgtaacaacacgaccaacgactttatcaacttctaccagactattgatgtacttatcattgatgatattcaggagtttgccggagttaccaaaactcagaacaacttcttccatatcttcaatcatctgcatcagaacggcaagcagctcattctgacttccgaccgcgctccagtgttgctgcaaggtatcgaagaacgtctgttgacccgtttcaaatggggtatggtagccgaactcgaaaagccgaccgtagaacttcgcaaaaatatcctacgtaataagatacaccgcgacggattgcaatttccaccggaagtgattgattatattgctgaaaatgtgaatgagagcgtacgcgatctggaaggtatcgttattgcgattatggcacgttctaccattttcaacaaggaaatagatctggatttggcacagcacattgtgcatggcgtagttcacaacgaaacaaaagctgtaacaattgacgatattcttaaagtcgtatgtaagcatttcgacttggaaccgtctgccatacatacgaaatccagaaaaagagaagtggttcaggcacgccagattgccatgtacctggctaaaaatcacacagacttttcaacatccaagataggcaaattcattggtaacaaagaccatgcaacagtacttcacgcctgcaaaacagtaaaaggccaactggaagtagacaagagctttcatgcagaagtacaggaaattgaatcactgctgaagaagagaaactaaatcaacgataaaaatagcaggtattaagtattatccatgcgtgtgcatataaagcaaatgtaactgcgataatacttgatacctgctgtttatttcaagtacttatttcaaaaaaccttgttgacgaagtactttcaacaagttatcggacataaattcattatctttctttgtataacgtatgtctgtaaaaacctgagcaagcgtttctttctgattctcttcgatgaattgtttattttcaggcaacgattccttataggcatacagtttatcaatatcttcggatgtgtagtcatgataggtttcctgatgtacagccgcttccaaaggtaaacggtcaacttgtgcagggatactgtccgggtagcctaccgttatagttgtgagagggaataccagctccggaagttgcagagtatcaataatcatctgcggattataagtagttgttcccaaatagcagattcccagtccggcttcctctgccaacgtacagaaggtctgggcaacaagcaaagtatccatggcggcattcataaaagacattaaattgtcatagcccggtacagcttttcgttgttcgcaccacttacaaaaacgacggaaatcggcacaaaaagtaagcacgaccggtgcattttttaccattggctggttaaaatgtgcaggcgaaagtttctccttcatttctgtatcacgcgtgacaattacactataaagttgcattcctcccattgtagaagcacggaaagaggtttcaagcaaatcatttaacaaatcgggagcgatatcttttggtagatatttccgaatagttcttctgttctttacggtttcaaacatatattttttttgcaaagatataaaaagaaaaattcattccgctatatcgacagaaaagaatagttttctttttggagaactttaacctttaaacctttctgcgatttcattgtttatcaattacttagcaataacaaatggaaaacttgcaacctgttaataaattatttcatttttattttgatagatgaaaaaacattcttagatttgcaaccacatttgttaatgataagtaaacttctacacattacttattaaaaataaaatctaagacacataacatcgtggaaaaacaaatttattcttatgatgaagcctatgaagaatctttacgatattttcaaggcgatgagcttgctgccagggtttgggtaaacaaatacgcagtcaaggactctttcggaaatatttacgaaaagtctccggaagatatgcattggagaattgcaaatgaagtggcacgtatcgaatctaagtacccgaacggcctgactgcaaaggaactatatgatctattggatcatttcaaatatatcgttccccaaggcagcccgatgacaggcatcggtaatgattatcaggtggcttcattatccaactgcttcgtaatcggagtggacggcgccgcagactcttatggtgctatcatcaaaatcgacgaagaacaagtgcaattgatgaaaagacgtggtggtgtaggtcacgacctgtctcacatccgcccgaaaggttctcccgttaaaaactcggctcttacttctaccggccttgttccgttcatggaacgttattccaattcgacccgtgaagttgcccaggacggacgtcgtggcgcgttgatgttaagtgtgtctatcaaacatccggattccgaagcattcattgatgcaaaaatgacggaaggaaaggttaccggagcaaatgtatcagtcaaactggacgatgctttcatgcaggctgccgtagagggcaaaccttatgtacagcaatatcccattgacgctgccaatcctgcattcacaaaagaaatcgacgcttctaccctatggaagaagatcgtacataatgcatggaaatcagcagaaccgggtgtattgttctgggatacgattatccgtgaatctgtgcccgattgttatgctgatctgggttacaagacagtatctactaatccctgcggtgaaataccattgtgtccttacgattcttgccgattgctggctatcaatctatattcttatgtagtgaatccgttcaagccggacgcatattttgattttgatttattcaagaagcacgtggctttggctcagcgcatcatggatgatatcatcgacctcgaactggagaaaatcgagcgtatcatgaagaagattgatgaagatccggaaaacgaagaagtgaaacgtgcggaacgtgtactttgggaaaagatatataagaagagcggtcagggccgtcgtaccggtgtgggtatcactgccgaaggcgatatgcttgctgctttaggattgcgttatggtacggaagaagcaacagagttctctgagaaagtacataagacagtggctttgggtgcctatcgttcttctgtcgaaatggcaaaagagcgcggtgcttttgaaatctacaataacgaacgcgaacagaataatccgttcatcaaacgccttgccgaagctgatccggagctatatgcagaaatgaagaagtacggacgccgtaacattgcgtgtctgactatcgctcctaccggtacaaccagtttgatgacgcagaccacttcaggtatcgagcctgtattcctgcctgtttacaaacgtagaagaaaggtcaacccgaatgacaccaatgtacatgtggatttcgttgatgaaacaggagacgcattcgaggaatacattgtattccaccataagtttgttacatggatggaagcgaacggttatgatcctgccagacgctatacacaggaagaaattgacgaactggttgccaaatcaccttactataaagctacctccaatgacgtagactggttgatgaaagtgaagatgcagggaagaatccagaaatgggttgaccactctatcagtgtaactatcaatctgccgaacgatgtagacgaagatttagtgaatcggttatatgtagaagcatggaaatccggttgcaaaggctgtacggtatatcgtgacggttcacgttccggagtactgatttctacaaaatcagagaaaaaagaggaacttcctccttgcaaaccgcctacggtagtagaggtacgcccgaaagttttggaagctgacgttgtccgtttccagaacaacaaggaaaaatgggtggcatttgtcggattgttggacggacatccttatgagatctttaccggtttgcaggatgatgacgaaggtatcttgttgcctaagagtgtgacttgcgggcgtatcatcaagaatgtagacgaagatggaacaaaacgttatgacttccagtttgaaaacaaacgcggatataagactactattgaagggttgtccgaaaagttcaacaaagaatattggaattatgccaaattgatttccggcgtactccgctaccggatgccgattgaacaagtaatcaagctggtcggttcgctccagttgaacagcgaaagtatcaatacctggaaaaatggtgtggaacgcgcattgaagaaatacattcaggacggaacggaagccaaaggaaagaaatgcccgaactgcggcaacgaaactttggtttatcaggaaggctgtctgatttgtacgacttgcggcgcttccagatgcggataaacatactcgtatgttaattaatatataaacaaaaggttaaaaggagtccggtgcggctccttttattttttattcaaaaaaatgtcttatacttgcagtatcattagtatccaatcaaaatctaatatatatgattttatcatttaatatagaataccgcaccaactggggagaagaggtcagaattgccggactgtctccggaatctgtccctttgcataccacagacggtatctactggacggcagaactggaattcgaagttcccaacgaaggattgacaattcattacaattaccagatagaacagaacggaattgtgacccgcaaagaatgggacagtttttcccgatgtcttttcctgtccggtacctccaagaagaaatatagaatcaatgactgctggaagaatattcccgagcaattatgcttttacagttctgcttttacagaagccctgctggcacatcctgaaagggaagaaattccgcaaagttacaaaaaagggctggttatcaaggcttatgctccgtgtatcaacaaggattactgcctggcaatctgcggcaatcaaaaggcattaggcaactggaatccggagaaggccgtcctcatgagtgatgcaaactttccggaatggcagatagaactggatgcaagtaaactgaagttcccgctggaatataagtttatcctctataacaaacaggaaaagaaagcggattgttgggagaagaatcctaaccggtatttagccgatccggaattaaagaccaacgagacactagtaatctccgaccggtatgtctatttcgatattcctgcatggaaaggagcaggtatggctatacccgtattttccttaaaatcagaaaagagcttcggagtcggggatttcggtgatctgaaacggttggttgactgggctgtatctactcatcagaaggtgatacagattctgccggtcaatgacacaacaatgacacacgcatggactgattcttatccttataatagtatttctatctatgcttttcacccgatgtacgcggatataaggcaaatgggaacactcaaagacaaagaagcggtagcaaagttcaacgaaaaacaaaaagaattgaacagtctgccggccattgactatgaagcagtcaaccaaaccaaatgggagtattaccgcctattattccggcaggacggagaaaagacattatcttccaaaggtttcaaagagtttttcgatgccaataaagaatggctgcaaccgtatgctgttttcagttatttacgggatgcctacaaaacaccgaatttccgtgaatggcctaaatattctacttaccatgcaaaggagatagaaaagatgtgccagccggagacggcagattatccgcatatcgccctttacttttatattcagtatcatctgcatttgcagttattggccgctacccaatatgctcgcgagcaaggtgtcgcactgaaaggagatatccctatcggtatcagccggaatagtgtggaagcctggacggagccttattatttcaacctcaacggacaagcaggtgcacctcccgatgatttttcgataaacggacagaactggggattccctacctacaactgggatatcatggaagaggacggttaccgctggtggatgagacgtttccaaaaaatggcggaatacttcgatgcttaccggatcgaccatattctcggcttcttccgtatttgggaaataccgatgcacgctgtacacggcttattaggacaatttaccccttctctccctatgagccgggaagaaattgagagtttcggttttacattccgtgacgaatatctgcttccttatatccatgagtctttcctcgggcaagtgttcggaccgcataccgaattcgtgaaacagaactttcttcaaacaactgatgtatccggtatctaccacatgaaaccgggatttgagactcaacgggaagtggaaaatttcttttccgacagaaaagatgaagacagtatttggattcgggaaggactttattctttaattagcaacgtactttttgttccggacaagaaagaggaaggaaaatatcatccccgcatcggagtacagcgcgactttattttccgttcattgagtgaggcagaaaagaatgcttttaacaagctctatgaccagtattattatcaccggcacaatgcattctggcagcaacaggcaatgaagaagttaccacaactgacacaatccacccgtatgttagtttgcggagaagacttgggaatgattcccgattgcgttgcatcggtaatgaacgacttacgcatccttagcctggagattcagcgaatgcctaagaatccgttgcacgagttcggacatctgagcgaatatccataccggtctgtctgcacgatctctactcacgatatgtccactttacgtggctggtgggaagaagattaccaacagacccaacgttattataatacgattttgggacattatggcattgctccaactgttgcaacccccgaactatgcgaggaggtggtacgtaaccatctcaacagtaactcaattctctgtattctttccctgcaagactggttgtcgattgacggaaaatggagaaatcccaatgtgcaggaagaacggatcaacgtaccgtcgaacccgagaaattactggcgatatcgaatgcatctcacattggaacaactaatgaaggctaaagaacttaataagaagataggcgaacttatcaaatatacagggagagttccccaaaaataagactaaaataatgggagataccaagaataacatgaagataaacaacagtactatttttttaaaagatatccgttgctacgcctaccacggagtagcaccacaagagaatcttatcggaaatgagtatgtcattgacctgaaactcaaagtagatatcagcaaagccgcacaaacggatgaagtgacagatacagtcaactacgccgaagtacataatgtgataaaaaccgaaatggcgattccttccaaattgctggaacatgccggtggcagaatcgtacaaaaacttttcgagacatttcctgatattgaggaagtggagcttcgcctttctaagcggaatccacctatgggagcagacattgatgccgcaggcattgagttgtattgtagtagaaaataaaagggtatccagcttgggataccctacaaattatattctttctgcaattaatctcccggaagtttctatttcttcttctttcttctattcacagattccacagcctccgtcacgacaggcttattctcgaaacgtttcgtataaccggaatagtcgggatgaatacgttcgtaatcaggatccataaataaaggactggagattatatggtcagccgtcgaacggttacaacagaaaactatgttttccacacctgccagacgggttaatgcttttacatccgtatcatgcggttgcagtgtcatagggtcagtaaagaagaaaagataatcaatctgaccatctacaatgcgcgatcccatttgctggtcacctcccaagggaccggattttagaatcgtaaaatcccattcctcatccggatgtttctccttcagtgctttcaatattaaggtaccggtagtacctgtacaatagaatttatttcccattaatagttctgaattccataatacccattcgatgagatctttcttcatggcatcatgtgctaccagcccgataccttttctaacttttgattccatttcgttatccttttaagtccgacaattgagagaatcgtttgcatcctcttccataaaactgccacaagatactattttttgtccgttcaggtatcagatccaaccttttttttctcatattttcttcacgggaagaagaaaatgaaggacgaatctgcttatattctttccttgcacgcatcacggcacaagcattatcccaatcgcctttcagcaaaaaaacaaatgccgccacatagtccaggcaagcccggatacgcatcactttatttaactcctcagccgggagatttttatacaacatgacaaggttattacggaaattaagaaaggtctttcgggggttctcttttttaagtgtagccccacctacatgatagaccttactttgagggacacaaacaatctcccgtccgcgagagcgtaacctccagcacaaatcaatttcttccatgtgcgcaaagaaacgtccgtccagtccgcccacttccttataatcggcacgacgaataaccaaagccgcgcctgttgcccaaaaaacgggaatgaccttatcatactggccttcatccttctcaaccactcccattatacgtccacgacaaaagggataaccatatttatccagaaagccacctgccgccccggcatattcaaaatgatctttttgccgccagctccgtattttcggttggcaggcagcaacttccggatgaatatcaagatatgcaatcatcggttccaaccaatgttccgttacttcaacatccgaatttaaaagaacaacatagtcggcttccacctgctgcaaagccaagttgtatccgtctgcaaaaccatggttctgatccaatagaatcaccctaaccgaaggaaaatcctgtcggagcatctccaccgaagcgtccgtagaaccattatcagccacacaaacctctaccccctctcctttcgaataccggactaccgacggaagaaaagtgcgaagcatatcacacccattccaattcaaaatgactactgatactttcattgcttttgcttctctttcagcctttctttctcctgttccacgatgtccgcccattcttctctggaggctttccaacgcttatgcgaccacagccaataagccggctcccgacggattgtctgttccagataccgggcaaacatttcagtaatttctccttcggctgtattcttaggagtttccgtcatcaatttaaattccgcttcacagtatcctctgcgttttttagtcagttcacagtaaaagaccgggaaattcatcatcttggcaatccgttccgccccattcaagaaagctgtttcctgacctaaaaatgtagtccaatacctgtcattaccactaggccactggtcggttatcaaaccgacaaccattttctttccttcacgtttcaactttataatctcccgtgcagtagaatgcttaggaatattgtatcccccgaaacgagaacggatacgtttaaacagttcatccagatatttatctcttaatggcttatagacctgtacgggtacatctcccggcttcattattgctcccattccgatcaaccactcataattggcataatgcggaatcatcacaataatcccgccatacttctccgtcagttcgagatattgttccgtattcttgtaaatcatccgttggcaaagatcttcagccgacatgtgcagaagttttaagtcttcaagcatataatccgacagataacgatagaatttacgctctatctgcaacctttcagcgggagtcttttccgggaatgacttcgtcaagtttcctctgacaaccttacggcgatattttcccacataatacatcaacagataattgaaatccgaaagtatatacagaactcggaaaggaagagctgaaaacagccacattccagtggataccagccaatagataaatctcgatttcatacttatatcagaattgtacctttaagtgctgtcttatcttcgttaaaatctcccaaacggacattgattacctgattatccaatgagttgtccgcttccacttcaacacggatatagttctccgtaaacccatgcatcggagtccccgcttttgatttttccattaaaaccgacattgtctgcccgatatgtcgggcgtaaaaagcctgcgttttctcatcagaaagcgctaacagccgctgactgcgctgatgtttttcttccggagaaacaacatagtctattttcaatgcctgcgtgccgggacgttcggaatagctaaacacatgcaactgtgtcacatccaatccggcgataaactgataagcctcctcgaagtattcctccgtctcgccgcgagtacccacaatcacatcaacaccgataaaagcatccggcatcacttccttaatctttttcaccttcgatgcgaaaagagcggtatcataacgacgacgcatcaatttcaacacctcatcgctaccggattgcaacggaatatgaaaatgaggcataaaactacgcgaacgggatacgaactcaataatttcgtctgtcagcagatttggctcaatggaagatatacggtaacgttctataccctcaacctgatccaatgcttttacaagatcaaaaaaggtttctcttgttgtcttaccgaaatctccgatattgacacctgtcaatacaatttcttttccgccttcggcagcagcttgcccggcctgttccaccatagaagcgattgttccgttacggctacgcccacgggcaaaaggaatcgtacaatacgaacaaaaataatcacagccgtcctgcactttcaggaaaaagcgggtacggtctccacgggaacacgagggtgaaaatgaacggatatctttggttgcagtagtaaaagcctctccttcttcatgtttttgcaggttgccgagataccggagcaaatcacttttctgttcagcacccaacacgacatccactccttttatctgtgccacatcgccgggtttcagttgcgcatagcatccggtcactaccacaaaagcaccgggatgttgtttcaccaaccgatgaatggcctgccggcacttcttgtccgccatttccgtcaccgaacaggtatttaccacacaaatatctgctttttctcctttacgcgcagttctgacccctgcttcacgcaagattttaccgatagttgaagtctctgaaaaattcaatttgcagcctaatgtataataaacggctgtcttattttgaaacacagtggtatctatcataagctgttataaacacatatttcgtgcaaagttacacattattattagtaaaacactttaggatacgaaagtttattcctatttttgcacaattcactaaaaaacgtgcaatgattaaagagaatttcattaaactatacgaaaacagttttcgtgagaattgggatttgccctgttacaccgattatggagaaaatacccaatatacgtatggtcaggtagccgaagaaatcgcccgtttacacctgttattcaaacattgtagcctccgaagaggagataagatctccgttatcggcaaaaataatgcccattggtgcatcgcctatatggcaacaattacatacggagcaattattgtccctatcttacaggacttttctccaaacgatgttcaccatattgtcaaccattccgaatcaactttcttattcaccagtgacaatatttgggataacctagaggaagaaaaactcaccggattgcgtggtgtattctcattaaccgatttccgttgtctctaccaacgggacggagaaaccatacagaaattcctgaagaatcttgataaagaaatgcattcttcttatccgcaaggattcagccgtgaaaatatacaatataccactttatccaacgataaagtaatgctcctaaactacacttccggaacgaccggtttcagtaaaggagtcatgctgacaggtaacaacctggcaggaaacgtcactttcggtattcggaccgagttactgaaaaagggagataaagtgctttctttcctcccgctcgctcatgcatacggctgtgcatttgattttctgacagcgacagcagtcggaacccatgtcaccttgctcggtaaaatcccttctcccaaaatcattatgaaggccttcgaggaggtgaaacccaatttgattatcactgttccattagtcatcgaaaaaatatacaagaacatcattcagccgctcattaataagaaaggtatgaagtgggcactcaacatccccttgcttgatacgcaaatctacaatcagatacgcaaaaaactgattgatgcgctgggtggccgtttcaaagagattattatcggcggcgcagctatggacaaagaagtggaagaatttttctacaaaataaaattcccttttactattggttatggaatgacagagtgtggtccccttatcagttatgctccatggaatgagttcgttctaggctcctccggaaagattctggatattatggaggcacgcatctacaaggaaagcccagaggcagaaaccggagaaatacaagtccggggcgagaatgtaatggtgggatattataagaatcccgaagctacaaacgaagtattcaccgaagacggctggctacgtaccggcgacctcggcacaatggatgcaaacggcaacatcttcattcgcggacgattgaaaacaatgattttaagttcaagcgggcagaacatcttccccgaagaactggaaaccaaactcaacaacctgccttttatccttgaaagccttgttatcgagtacaacaagaaattggtggcacttgtttatgctgattatgaagcattggactctctcgggttgaacaatccggataatctgaaaacaattatggatgaaaatctgaagaatctgaataacagtgtggctgcttatgaaaaaatcagcaaaatccagctatatcctacagaatttgaaaagactccgaaacggagtatcaaaagatatctatataacagtattacaatagattagcatgttttaaaacataaagcgaaggtgtattaaccaaccttccgaaaaaaaacataaaaaaagttggcttttagagaacaacatattgaaaaagtacatacctttgcagcgttttaataaagcaattgattgtattacgtttttaaaaagcaaagaaaatgaaaaaattagttttaatggcagtagctatcgtagctgtatcattcgcatcatgtggtaacaaagcagcagacgctgcaaaagcaactgcagattctatccgtatcgctgactcaatcgcagcagtagaagcagcagcagctgaagaagcagcagccgcagcagcagctgatacattggcaactgatagcgtagcagctgaaacagctgaataattcagaaactgctagagagaattgaaagtctgacatgcgaaagcatgcacagacttttttttatatcttaaatccaagtaattacgctatttagtataggacttctctacaaaaggagcatttaataaataatcaaggctcacctctacgctttcctctaccggcatactatatttttctatctcagcaacaagatattgaactcccgctgtctttgcattcttaaagatagcatcaaaaccgaccattccactttgcccgatttctctatgatctttgatatggaatatcttgaacctaccgggatacttattaaagtaatctaccggactgttttgtccgcgaacgacccaataaacatccatttggaagaaaacatattcaggattcgtatgttccagcatatagtcatacatcacctgaccttccactttctgaaattcatgcgcatgattatgatagccaaaccgcaagccttgttggttgcagcacttacctatttcattgtaataagcacaataagtttccaaatccttcaatgttttaggaacatccatccagggagctacgatatatttcattcctgctgccttatggtcggcgatacactgattccaccattcaagtgattttgaataatcaccggaagccagttcctctttcgacaatccacgtgtgcaatgcgaagacaaaactttcattccggccgattcgacatccttcttgaattgccggggagttctatcataaaattttccattattataattagccgcttcaacaccggtatatcccatttttgccaatttcgcgagaatggcagtataagccggatcacattttccgtccttattgtctaccctattcaatatatctctaacagaatagagctgaatagccacttctttcttagttttcttagtctgtgccgtcactgcaaccggaatcatcagaagagcagctaacacacataagcaaattcgagtcttcatataattagatatcaggagtttacaatgattcaaattccacaagcaaacaaacataaattcattcacttgcggaatttcgagttatctatgtgattagtccaataccttcacgcggatattacggaaccaaacatcatcgccgtgatcctgcaatccgataaaaccttcgtgattatcaccaccacagttattcagcagttcaaatgccaaaggccatttttcttcactaaatttacttgcctgcaacatatcagtccattgttttgtccacagatgatactcaagtacattctcatcattttgtccatggacaactgtacctttataaaccataatcttagccttgttccattcaccgaacggcttggagttttgaggaactgccggaatcatgtcatacaaagaagccgactgacgattgttatccttgcccaattttgcatccggatgattggcattatccaaaatctgatattcaggtgcagaaatatagataggttcaagcacatcattcccatctttatccttagaagtaatttcctgagctaaatacaagataccggaattactacctttagcaaccttccactccaactccaattcaaagtttttaaacttatgagcaaaaatcaggtcgccgccatcagcgtcttgcgcttcaccgccaccggttccgttaaatttgatacaaccgtcttcaatagtccatttagcaggaactttgtcttttccataaccacgccatccgtcaaacgtcttaccatcaaagatcgtgatgtaaccgttttcatcaacaggcaatttcagactatccgtttcgggtgctttcaatgattttgaatatgccaatgctacttcattgggttgatcggcctgagcacttcctgatttctgaccaccgcaagcaaccaaggctcctgctgcaagacaagctaaagggtaaaatactttcttcatactaatagttatttaatttttaatcttttaatttctttcatctattcttaccgaggcatatcgggcaatctccacccttcacgataattatgtttcaccaactcggcagcaaactgttttgcattaaccggatctgtccaagtcttgtcaaatgtcgggtgaccgtcgtgaatcttgaatccgtcttttacacaagttctaagagtttccgtatcactgatattcgtaaagcacatattaacaccgtcccattccaacgttttgttcaaaccctgcaagcggatagccaatactcccatcactaccatttcattcatcggacctgcctccgagaagtcagacttagtcatgacgcggcttgacttatcttctttacaggcacgtacccaatccatttcgtgaccaccattcatcgcattcggtacacggcgacaaactttcggagcattcggcacgcggcccgacaacaagaatggctgctgaccgtaacatccacagatcaatgtatcttttgttccgtgaaaaatagtcagcccaccaccaggccccattagctgttttccttccggaaatcctttcggacgttcaggcatcataccaccgtcataccaatgaacttcaacttccggcaacgcaactttcggcatattatcacgggcagggaaaatcattttcacatgctgtgcctgcggagcacaagcactcaacaacaaagtagaagaaccttccacctttgtagggtaacccagtttcagagctctgaacggttgatgcaggatatgacaagccatgtcacccaacgcacctgttccatagtcccaccagccgcgccagttccaaggatgataaatttcattatacggattcaacttagccggaccggtaaataagtcccagttcaaggtaccaggaatacggtccgccttttctggagcatttagtccttgcggccagataggacggtcagtagcacattccaccttagtcacttcacctatctcaccattccatatccattcacaaactaaatctgtcccttcatcggatgctccctgattacccatttgagtggctacaccagtcgaagcagctaatttagtcaacaaacgagattcataaacagagtgagtcaagggtttctggcagaatacatgtttacccattgtcattgcatcggcagtgatgatagcatgcgtatgatcggcagtagcaataattaccccatcaatggatttacccatttcctcatacatcttacggtaatcccagtatttctttgctttcggaaattcatcgaataccctttttgcatatttccagtccacatcacaaagagccacaatgttttccgtaccctttactttattgatattggcatgccccatgccaccaatacctacggctgcaatatttaatttatcactgggagacacgtgtccgtggctcatacctagaatagagcttggagcaatggtaatgcctgccaaagccatagcgcccgttttaagaaaatctcttctcgaaatgtctgacataattagtaattttaagggtttgttatttgtggtagattactatgtagcaatccgtatccatttttcatattttttcttcgttcccggatttgttcaagcgtacgcagatcaccgatagccggtaaatcgtgcatatgtgcgttttggaggaatttccatgcatattcggatgcaatagcagagtcacgcaataatggtaagcgcgggtcccgttgcccggcttcgatagaatcggcaaacaaatcacacaatacatcaatatttttgccaccgaaaggtttctcaacgcgaagtgtctggttcaccccatgcaaatcgactacagcggtagtaaagtcatgtgtcatgcgtacaatgccctctgttccgataatatcgacgtatgaattatgtgtctggtctttagataattgtccataaacgaacccctgcgtaatatcaaaaactactccattctgaaaagtcccgtgacattgaatccaccatgggtctttgtaattccacatattcactccttgggcgttccatgtccgatattcacatccggcatacgaacgggcaatatctacataatgcatgccacaatcatggaaagcaggaccttcatattcatgcccttcacccggtgctaatccaggcgtcatgtggcaaatacgaataatagccaactcaccgatttcgccctgccgaatatattctttcatcaggttatgataccaggaatttcgcagatacaaattcaccgtagaaaagacatctgaactttcggccatttccacgactttccattcattttccattgtatctgcaacaggcttttctgcaatgatatgttttccatatcgaatggccttttctatttgttccattcgggagtcagctaatgtaaaaagcccgacaacctgcacactttcatcttcaaaaattttctgattatcttctattacataagattccggagataattcttttgccaattcacgtgatgcaggattcgtatcacaaatataggcaatatcccatcggccacttttccgcatcgcatcccagtagaatcttcccattctaccaaagccgattattcctacttttattttcgtgcctagcgagaattgtgtattcataaaacatagcaaatttaagtgcaaacaatataaatcggtcaattttcattatcaagctaattaaccggaaactgatattgcaaaactagccaaataaacaatacttcatttagtttacacgaatttatgtagacttaaaaaatatattatcacttaataatcaatatattaagcattcaaaggagggataaaaatgtagaaagattggaattttttttgtgtggttcgaggtttatctttcatctatgagacaaattttcataatttcattttcaaattcatcccgatcaacagcagatttattcctcatttttgtacgatagttgtaaacagtactagtagagcaacgaaggaaatttgctatcttcccactatccgaaattcccaaacgtaacaaggcatagatacgaagttccctattcaataatgtatcagtttttaagacaatccgttcttcttctttcaacaaagcattgaaatcggaaacaaaagtgggatacaaattaagaaacaccctatcaaaacgggcatataatgcgttaagttcctcatcaataagtgccgacgattttaacttcttaattagttcatcataatatttattgatagcatatttatacagaacattctgatatttctccattttactgatataactgaaacatacatcaaaaaactcggctatataatgttcctttatattattagtttccgacaactgattattctgttcgttcaactgattattcatagtattcagtttctcgttcaatcgcaaaagtttttcattactctgcaccaacgcccgctttatcttcagaatctttctcatctgaatataaatacatatcaccaacaagaccaaaagaaaaagaatgatactggttgaaataagaaaagtaatcaaatttgattttgaccgggcctcctctgtctggtaagcagtattaataatagaatagaacttataaatttccattgcacggaaatgaataccggaagaaacaacatcatcaatagcagactgtgtaaacttaaaagcgtcagacaaattcttttcttcgtactgtatcaatgccaatgcttgcaaggaagcggtttcccgtgttgcgttccggatatccgcaatagcagacatcatcaggtacttttttctctcatccatttttttctgatgccagcagaatgatgcatacgcatgagtaatcatggcataatgaggcgtccccacttcctccgtatctaataattcctgaagaactgttttcgcttttatggaatcgcgccctccataataatatgcccgggataatttataatcaaaagaagtttgatccagaagagatagtaatgaatcctgatatactgcccgctgcttcccatagcgactattggcagtgatagagtaatactcccagaaacgggaataagtttcataataaacagataataaatctttggaaagttctgaggtttttattttttccaaaatcaactccgcatccctataccgaccgcacatagaatataaaagactaagctgcaaagatgactggttctttaaatccctgttattcaatttacgggcaatctctaaattctgatcgacataatgaatggccgaatcaacgacaaacttcttatattcgttacataactgaaaatttatcttatatttttgttcaagagtcaggcctgatcccttcagcagacatttaatccgattgatccgttgctctttttgttgaatgaagagtggtttttcatctatcatcctgcgcaatgaatccgctagagacttcaattcatcattcgcataaagagcactgccaattcctaaagtaatcagcagaagcaaaaatttcttcttcagaaaacgacatttgaatctcataatattagcaggaataataaaaaaagcgatttattcatcagaacaaatcgcttttcgtatatgaagtaaatttgctcttattctgcaactacttcgaaaggaatttcaacagaaacttctttgtgaagtttcactactgctttgtagttacctacttctttcacagcgtcttttacaacgatgatctttctgtcaacttcgtgacccagcttagccaaagcttcagcaatctggatattgccaacagaaccgaagatagtaccggttgaacttactttagttgcaatagtcaaagaaacaccttccaacttagcagctgttgcctcagcatctttcttgattttctcaagtttgtgagcacgctgtttcagttcttcagccaacattttctttgcagaaggagaagcgatcaccgcttttccggttgggatcagataattacgaccgtatccggatttcacgtttacgatatcgttcttataacccaagtttacaatgtcttcttttaatataatttccatacttttcctccttcttatttcatcatgtcagttacataaggcaacaatgccaagtgacgagctctcttcacagcctgcgcgatacggcgttgaaacttcaaagaagtacccgtgatacgacgcggaaggattttaccttgttcattcaagaatttcttcaagaattcaggatctttgtagtcgatgtacttaataccgctctttttgaaacggcagtattttttcttcttaacgtctactgacggcggagttaaatatctgatttctgattgaacttgttgtgccatgattaatcctcctttttgtttgatttaacacttcttcttttagcagcatattctgcagcatacttatccatcttaaaagtcaagaaacggataacgcgttcatcacgacggaaattaacttccaacttgtcaattacagtaggatctgcattgaactcaatcagttgataaaaacctgtagactttttctgaattggataagccaatttcttcagtccccagttttcttcattgataatctcagcaccttcagcttgaagaatacctttgaatttttctaccgcttccttcatctgaacatcagataaaacgggagttaaaatgaaaacggtttcgtattgattcatacttcgtttaattaaataaataaattatttgattttaaatgcgggtgcaaagttagacaatttattttgaactacaaacatttaatctttttttgtatccgaatgtaggaattatccgagaagtggcttacctttgcaaagttgtttaaacaataatttcatgatagagcaatttaactttgatatccggcttatattcgccatactgaatggcaaagtttccgcagcaatcaatcggaaactataccgtaacttccgtcagaacggattggaaatcagtccggaacagtggacagtgcttatttttctatgggaaaaagacggtgttacccaacaagagttgtgtaatgcaacttttaaagacaaacccagtatgacccgcttgatagataatatggaacgccaacaccttgtcgtgcgcatttccgataaaaaagaccgtcgtaccaacctgatccacctgaccaaagacgggaaggagttggaagaaaaggcgcgtatcatagcagggcaaacactgaaagaggcactccatggtatcaccctcgaagaactgagtatcgggcaggaagtgttgaaaaaggtattcttcaacacgaaagattaaactgtaaaacaaccacacaattcataaaatccactaaatcctgtctttataatggattttttatccaaataatttcgcccgttaaagaattatgctttaatttgtgactggaatataataatctattaaaatacacacacatgaaaggcttattaaagaacttaggattgatattaatcttgatcggagtagttatcctactggcttgttcatttacaggcaatgtaaacaacaacgccattctgggtacctcagtagtactggtagtactgggactcatttcttatatcgttattaataagaagatcgctgattaatttcgtagaaatcaataaaaaatcccgaaaacgaatgtttccgggattttttatttccagctatcggatgtcttttcattaagattcaacctccggtgtaattaacttgtaaccctttccgtgaatattgataatctcaatagaatcatcttctttcaagtgcttacgcaatttcgtaatatacacgtccatactacgtgcattgaaatagttatcgtcaatccaaattgttttcaaagcaaagtcacgttgcagaatctcatttgcatgtgcgcaaagcaagcctagcaattcagattctttcgtagtcaacttagtttgtttgccttccgtagccagaatttgcttctgagtgtcaaaagtaaacttaccaatcttatagatattgctttctttgttcttctttccacgaacacgtctcaagattgcttcaattctaaatgtcaattcttccatactgaacggtttggtgatataatcatccgcaccaatcttaaatccttccaggatatcttctttcagcgttttagctgtcaggaagataataggaatttcagcattcgctgcacggacatcttgtgccagagtgaagccatcttttttaggcatcataacgtcaaatacacacaagtcatatttattcttcaagaaagccttataaccggcttctccatcaggatataactcagcagaataaccttttgcctgtaaatattctcttaaaagcatgccaagattttcgtcatcctcgcataataaaatacgcagtttctcgtccatatcaattattttttaataaaggtaatgcaataataaatttagttcccacgttcaggtcactttccgcccggatcgtccccttatgttctacgataattttcttcacataagccaatcctaaaccaaagcccttcacatcgtgcagattacctgtatgtacacgatagaacttttcaaatatctttttcaggttctccttcttgataccaataccgttgtcctgtatcgaaatcatcagtttacccgactcattccacgttcttactttcagttccaaatcctcttccggcttcttatatttcaccgcattatccatcagattaaagattacatttgtaatatgcatctcatccgcaaatataacaggatcagtagcctcaaggttcgatgttatcttaccattataccgttccaccttcaatgcaaaagtgttgacaactcccgtaatcaattcgttcgcatcaatctctttcatcttcaaagtcgccttctgacggtcgaacatcgacatctgaagcactttttccacttggaaacgcaacctcttggtttcatcattaatgactcccgatatatgctggaacatctgtggagatttacctaccgccggatctttcaacatttgtgccgccaaggaaatggtcgatatcggtgtcttaaattcatgtgtcatattattgataaagtcattcttcatctccgtcagcttcttctgccggaatacgatataaatcgtaaagataaatgtcaccaacaataccagcgtaaatatcaacgacggaatcatgaagctcaccgaatcaaagagataatcccttctccccggaaaatgaactttcaaaacactcgtctttgcaggtggatcattcttaaacaatgcctgctgataagcctcatcacttcctttctcttcatagtccgcacaacgataaacacttcgtccttctttatcaagcacttcataatggaaaggcagatctataccattattatataaattcgcttgcaaataaccgttcaaatccccgaaccgaacccgttctccaattgatttgtcacttgcacgcctaatcatatccaagaccacctcatccagcaaagcccgctgatacatatagcgattcttaatagcctccaacatcgaattagaagtctggggaatcgtatttcgcccacgtaccattactttaggaagttcggacggtttgatagtcattactctcatttcaaaatcagaaataatttttccatcccgtgacttcactttgaatcgttgtgttgactgaaccacatcatcctgtcttaatgaagaattattctcagtcagagcttttctttctgcttctgtaatatcttcaaccaaccaacgctgggtttcagcatattctacatccttggaaacctgactcaaactattgcgtacagccgagtcaaactgttccttccgggttttcatcatttcctctatataacttacctgcaaatacagcaggctaaggaaggaaagccccattacaatacctaatatccaaattgttgacttcttcatagcaacaaaattaacactccctaattaacactcctaacacattaacttgatttaaccggaactttccggaaattaaccgtaagaggctatttaggttgtattctgattactacaacaataaaaccccttctttggtttgcaaatttaataaaaaattaaatcttttccttgcgtttttctatctttattaatcatagttaaacaaaaaccgtcgtcttttacttaaaaaagacgacggttttaacagtatcaagagaattactagttattcttctgtctgtttagcttcaaaatccttaatcaacttatcctgaacatctgtcggaacaagctcataactagagaacttcataatgaacgaagcacggccgccggtcagcgaactaagagcagtagagtaagatgacatttccttcaaaggtactttagccactagcttttcaaaacctttttcactactcatacccataatcatggcacgacgtccctggagatcccccattacatcacccattttatcagacggcacaaatacttctacatcataaatcggttccaaaatcttcgggcctgcatttttgaaggcttcgctgaaagcattacgccctgcaagcatgaaggaaatttcatttgaatctaccgggtgcatctttccatcgtacacaataacacgaacgtcacgagcatacgaacctgtcaacgggccttgctccatacgtgccataatacctttcaggatagcaggtaagaaacgggcatcgatagaaccacctacgatactattaataaacaccagtttaccaccccattccaacggcacttcttcggtacctttcacatttatcttaaattcctgtccgttaaacttatatgtatcgggcacaggcataccttctttgtaaggttctacaatgagatgcacttcaccgaactgaccggcaccaccagactgttttttgtggcgataatctgcacgggcagcttttgtgatcgtttcacgatacggaatcttcggttcttcatatttcacctgaagtttctcgttattttccagacgccatttcaaagtacgtagatggaattcaccctgtccgtgcaccagcgtttgcttcagttcttttgattgttcaattacccatgtcggatcttcctcgcgcatgcggttcaagatagtcatcatcttttccacatcagcctcgttcacaggtttgatcgcacgggaatattttgaattcggatatttgataaaattaaacttataatcgcagtccttcccgttcagggtattacccgttttcacgtctttcagtttcacggcagcaccaatatcaccggcttgcagttcttccactttcacacggttgccaccggctacgacataaatctgtgcaatgcgttctttcgaaccgcggtccgcattcaacaagtcgtctccttcgcgcactttaccactcattactttaaagtaggaaacttcaccgatatgcggttctacacttgtcttgaagaaatagagagattccggaccgttaacatccggagccacttctttaccttccgtattctgtactttcggcatttcggaaacaaaaggaacaacatttcccaaaaattccattaaacgacgaacacccatgtccttacctccacagacacagaataccgggaacatacctcttgcaaccaatcctttacgaataccctcacgcatttcgtcttccgaaagagagtcttgttcgaagaacttttccattagcccttcatcattttcggcagcggcctccaccaatgctttatgcatttccgtagccttttccagttcttcggcaggaatatcttcaatcacaggagccccaccctcgggtttccacgaatatttcttcatcaacagtacatcaatcaaagcattgaaaccaggaccggtagaaataggatattggataggaacaactttagagccataagcttcttttaattgttccaggatattatcatagtcgcatttttcgttatcaagctggttgactagaaaaataacaggtttattcagtttttctgtatatcggaaatgattttgcgtaccgacttcgacgccgtattggccattaagaagaataattgctgtgtcggtcacatttaatgcagttacagtactgcctacaaagtcgtccgagcccggacaatctataatattgagttttttattgttccattctacgtggagaacggtggagaaaacggagtaaccatactcttgttcaacagggaaataatcactaacagtgttttttgcggcaatagatccgcgacgttttataacaccactctcgaaaagcatcgcttccacgagagtggttttcccagagccagaacttcccaacaaggcaatgttcttgatttcattagtctgatatactttcataatacacaagatttaaataattacttagtatgactcacataccattcatttagtgttgcgcaaattagggatttattgggggaaaaacaacatttagggcagtgttactaaacaatgttatgtagcatatacttaacatgaacaattccgcttagtataaatttgcttcctcaacagaaacaatttaatagttcattacctattcggaaatattcatatacaacggtgttttgtgttaagagaaaacaattctttgatatattatccgataatagtcttacttttgcacctacaaaactcaaacagcatagctatggcaggtatctatcttcatattcctttctgcaagacccgttgcatctattgtgatttttactcgactacccgtagtgaactaataacacgctatatacatgccctatgcaatgaactggaaatgaggaaagaatatttgaaagaggaaaagatagaaactgtttatttcggcggcggtactccttcccaattaggagaagaagatttccaacaaatatttaaagccatacaaaagcattacggactggaagattgccgggagattaccctggaagccaatccggacgatttatccaaagaatacctgcaaatgctatcggctcttcccttcaaccgcatcagtatgggaatacaaactttcgatgacgcaactctcaaattattgaaacgccgccataatgctcggactgccaccgaggccgtccgcagatgccgggaagccggttatcaaaatatcagtgtcgacctcatatacggactgccgggagaaaccaaggaacggtgggagaaggatcttcgacaagctatcagcctgaatgtagaacacatttccgcttatcatctgatttatgaagaagatacacctatatataatatgttgaagcaacatcaaatatgtgaagtagacgaagattccagtctggagtttttcacgctactgatagaatatcttcaaaaggcaggatacgaacactacgaaatatccaacttctgtcgtcccggctactattcccgtcacaacacttcatattggaaaggaattccttatttaggatgcggaccttctgcacattctttcaatggaacaacacgcgaatggaacatttcttctatcgaccgctatataaaaggtattgaagaagggcaacgggtcttcgaaaccgagtatctcggcccgaccacccgttacaacgaatttattatcaccaccatgcgtaccgtatggggtacccccatagaaaagctaaaacaactgttcgggattgagatgtgggagtattgccggaaaatggcaactccctacctgaaaaacggcaaattggaagaatacgagggcgctttacgcctgacccgtgaagggattttcatttccgatagtattatgagcgatttactctgggtagactaaaaaactaagctataagccgatgaccgaatctgaagttagaaagttattacggcaaatgaaggagcaggattcgcaaactgctttccgcgacttctacgacatgacttatgaccgtcttttccgtattgcctactattacgtaaagcaagaggaatggtcacaagaaatcgttcttgatgtttttctccgactctggaaacaacgggacacactgctcgatgtaagaaacatcgaggattattgtttcattctagtcaaaaacgcttcactcaactatctggagaaggaatcaaagtacaccactgtccattcttcttgcttgccggaaccgcaggaacaaagttgttcacccgaggagacattaattaccgaagaattattcgctctttacgtcaaggcgcttgaccgcttgccggaacgttgccgtgaagtcttcatccgtatccgagaggaacatcaaagttatgcccaagtagccgaggagctcggtattagcaccaaaaccgtagatgcccaacttcagaaagctgtcagccggttgaaggaaatgattgcaagcagtcagatagaaagttattaagaagaaaatggaatacgtttatatttaacctttatttgctaaatacgaatagggaaattctggttacctccggtctttatcaacaaataaaccgaatagaatatgaagtataccgatacagaattggaaacgatactaagcaagctcatcgcttccacacgctcgccacgtgggcgcttttcagcagtagccagctatccgcagttggaaaagcgactaaaaccacatatccggtgtttattcccgacgcgtatgcgtatattggcagcagcggcagctgttattctgctctgtctttcggtaggaacagtatatttatatatgcaaccgacttcactccaaacagtatccacaatggccgaaacacgtaatgtcatcctgcccgacggcagttctgtactgttgaaccgtcattcgtcgctatcctatccgaagcggttcaagtcggacaaccgggaagtacaactcaccggagaagcctattttgaggttagcaaagaccagaagcacccgtttatcgtacagaccgagcacatcaacgtacaagtgttgggaactcacttcaatgtggacgcctatcgtaacaacccggaggtaaagactactttattgacaggttcggtagcagtcagcaataaaagtaattctgtccgcatgattttgaaaccgaatgaaattgctatatataataaggtgggaaataaactgacccgtcaggtgacgaaaaatgcaaaagatgaaatttcctggcgagacggggagtttatattcgacaatcttcccttaggagagatcgcccgcgaactgtccaattcattcgatacgccgattcatattgccgacacgtcactacaaagctatcggatttcggcacgattccgcaatggagaagacttggaaacaattttatctgtactacatcatgcaggttatttcaactattcacaaaataataaacagattgtcattaccactaaaccagacttaaaatgaagataatttcccaagattacctgcctgtcagaacattcatcctgataggcatggtactccttaccactacacagacgtacgcccaaaatataaatacacgtctttcgtttacactgaaaaatgccactctcaaagaattcgtcaaattgattgaaaattcaaccgggtattcttttatctatggtgaagaagtgggtatcaggcacaaaattacactgaaagcaaaagagatgcccttgcatgaggtgttggacactgtgtttaaagacgaacttataagctatcaattctccggacgatacatcctactgaaagagaaaaaaggacaaaagcccgtaagccgcaagtttactatcagcggatatgtcactgacgggacgtcttccgagacgttgattggcagtaacatcattgagagtcatcaatatcagggaaccaccaccaatccttacggcttttacagtatcacactgcctgaaggagaaaccgaactgcgtttctcctatctgggctatgctacggaaacacgcaaattcactctttccaaagatactctgctgaatatccgtatgcagggaaatacgcaactggaagaagttatcattatttccgacaaagctgaagccggagcaatagccacgcaaatgggtgccgtagagattccaatggcacaaataaaaaacaccccaagcatattgggagaggcagacgtgatgaaaaccattcaacttatgcccggagtacaagctggagtggacggttccgccggattgtatatacgcggaggaagtcccgaccagaaccttatcctgctggacggaacacctgtatataatgtagaccatttgttcggctttttctccgtctttacccccgaagcggtgaaaaaggtcactttgtttaaaagttcctttcccgcccgcttcggcggacgactttcctccgttatcgatgtacgtaccaacgatggagatatgcagaaataccacggtacgttcagtatcggactgctaaccagcaagattaacctggaagggcctatcatcaaaggaaaaacatcattcaatatttcagcacgtcgctcctatctggacttactggcaaagcctttcatgccggatgatgaaaaatacagttattacttttatgacatgaatgcaaaaattaatcataagttttctgaccggagtcggatgttcctaagtgcttaccacgggaaagaccattttgcagccgattatgacggtaataccgactttaaggacggaagtaatatggggtggggaaacacgattgtttccgcccgttggaactatattttcaataaccggttattcagcaatacaacagtttcctataacaactatttattcgacgttaacgcatacaccaataaccagtattctaccagtgcgggagcaatcattctcaaccgttattcctccaattatcattccggtattaccgactggagttaccagattgacttcgattataatccaacgcctgcccatcatataaaattcggcaccggctatcttttccaccgttttcaaccggacgtaacgacttctgtcatctcagacaaaaccgataacagaatagacagggataccacttatcataatgcaaacaacagcaggattcatgcacacgaagttacagcttatgcggaagataacttcaagattggttcccgcctccggctgaatctaggcctgcacctttccctgtttcacgtacaagatcagaattatctctccttacagccacgcatttcggcacgttatcaacttaataaggatattactatcaaagcatcttatacaaaaatgaaccaatatgtgcatttgttgtcgtccatgcctatcgccatgcccacggatttatgggtccctgtcacaaaaaaaataaagccgatgcgttctcaccaatatgctttaggcggatattacacaggtataaacgattgggagttctcggtagaaggttactacaaagatatgcgcaatgtactcgaatacaaagacggtgtcagtttcttcggttcttcctccggctgggaaaataaggtagaaatgggaaaaggacgatcggcaggaattgagtttatggcacaaaagacagcaggaaagacaaccggatggctgtcatacactctttcaaaaagtgaccgtaagtttacgaaaggaggcataaacaacggtgagtggtttccatataaatatgaccgccgccatagcattaacctcactattaatcataagttcagcgaccgtattgatattggagcctcttgggtattctacacgggaggcaccagtaccattccggaagagaagactactgttatccgtcctcacaatggtgcaaacaacggttttctatggtatggaacctacgataataccaatagttcacctactatcggagatgtgtcttacatagaacatcgtaacaacttccgcctccctgcaagccaccgcctcaacttgggagtgaacttcaataaaaagaccaaacacggtatgcgaacctggaatatcagtctatacaatgcatacaacgccatgaatccggcatgggtataccgaggccacaacaaacaaggactaagcgttatcaagaaatacaccttacttccactgattccttcttttacttatacttataaattttgaatatgaaaactattttttacctatctatactgttcgttacagtcacaatgatgtcgtcctgcgagaatgagttacccttcaacatcaacaataatccgcccaaactagtgatgaatgctttgattaatgcggagagcacggataatcttcttttcctcaacttcacaagtaaagaaaatagtactcatgtacaaaatgtaaccgtagaggtacgtatcaacggcgaactaaaagagagccttcgccctctcccacccgagacggaaggtaatccacaatgcagattcggcattacttcccgatttacccccggagacgcagtgcgcattgacgctattaccgacgacggacaatatcatgcatggacggaaatcaacgttccccaacgccctttcgaaatagaaaatgtcgatactgtcaccgttccgcttgcacaaagcggatataccacagaatatctgcgctatcggattacgatcaacgaccgtcccaatgaaacaaactattaccgtatcgtgatagataagcagactacactttggggatataaccacgaagaaggaggagacgattacatctattggacaaaacacagttataacttcattggccgcgaggatgtcgttcttacagacggacaacccaccaccggtgatgatgaagataacggactattcgatacagctaaaaatatttatggtgtattcgacgacacccggttcagaaacacttcctacactatgacagtttacaacaatactaaaatcgaaacaggtagcgattccggatatttttcaggaatggacgtcattatccgcttgatgagtatcacagaaacggaatattactacctgaaagcacttaatttagtagactccgacgcttacgatgaaacaatcaacgaaccgatcaaatatcccagcaatgtgcacggaggtacaggaatggtaggaatcagcacggaagttactcagacgattcatattataagtagctctcactcaaaaggtaaccttgctccaccagtccacgtttatcagtaagctccagcaatacgccctcacgaatcagagtgagccggttaacaacttccagcacttttccgtaattatgatcgctgatcacaatccctttatttaccgaatgcttttttatcagctctatcagtttatccgccaaatgaaaagataaataatcaaacggctcatccaacaatacgaatttagtgtcgccaagcaacagtaacttggcttccagatatctccgttcacctccggaaagctgtgagacacgtcggtccatacacgattgtgccacttcatcatctttataaaaatcagacacgacatccgtatccaaataataacgtaccaattgtttcattttttgatgtttaggcagataaccttgctgcggcaagaaagcaatcgtcccggaatgtcggtaaggagccggaagaattttgcatccatccaagcggataaacttcctgtcggctttcattgtaccgaatataatttgcataagtacggatttccccgtgccatttctgccgaacaatccgatgacgtctcccgtattgattctcaggtagacatccgacagtagttgccgggtaccgaagttcttgataacactatctatttcaagcaaatgatgcataatttcataatccagagaatgaaccaataaacagcaaatacggaaattatcaaattccgcttcggaataccggaattataataaaaatagtaggcttccttttcaagaatttccttgtaaagcaaacttgcaacaatacccaatccccctaacatataaggaaaaggttcaaaaatatactccaatcccactttactataagaagactggccaacacggagaaaggtacattgattttcaacgtactgaagaaaaacaaataatatagttttatcctccgcatttatcttgtattgatttgctgccaaatatattaataaaatagggaatcttactacaatcggtcctcctatttcagcttttaccttaaattctccaacaactccttcatccgaaagaaagttcccgacagttttaattaggagcaaagcactttttcaactatctttgcaaccaaaaacgagtacagactatgtttattatcattggaattatgctgacggggatgctgtttggttatctattacgtagcaaacgtctcacgtggatacataaaataatcactttccttatatgggtactgctatttctgctaggtattgatgtaggtggcaatgatattattgtcaaaggattgcatacattaggactcgaagcacttattattacgctggcagcggttatcggcagcacattattcgcctgggggctctggtacttattgtatataaggaatagaggaaaggagacgaaagcatgaaaggcagcctgattatcgtctcattctttatcgtgggtaccctgtgcggattctttcatctgattccttacgactttactgacagtaaacttagttattatgctctctgcggtttgatgttctgtgtaggtaccagcatcggaaatgatccgaacaccctgaaaagtttccgctcactgaatccccgtctcatgttcctgcctatcatgacaatactgggtacactggcagggtgtgccgtagcaggcttcttcatgagtcaacgttcatcatcagaatgtatggcaataggagcaggattcggctattattcgctttccagtatattcatcaccgaatacaaaggaccggaattggggactattgcattgctctccaatatcatgcgtgaaattacagccttactcggagcgcctttactagtgaaatatttcggaaaactagcccctatttctgttggtggagctacaactatggatactacgcttccaatcatcacccgatgttccggaaaagaatttgtcattatttctatctttcatggttttgtggtagacttcagcgttcctttcctggtcacattcttttgttcaatttcattctaataaaaatagatagcacgtttattctttttattatagtctcttatgtaattcttttgtatatttagcacatcaaacaataaaacgaatttattatgaattccccaagtttatcacgacaattttgttctgttgcttcctcacgacaaacatctaggaatatccctatttaacagtcaccattgtagctccaaagccatattcttggaaagaggcatcctgatagcgacaattactgtatttccgttttagttcgtcaatgatagctttccgaagtactccgtccccttttccgtgaataaaaacaatcttttgttcacgcttgttcttataggtttccattacctcccgaaacttatccaattgatagtttaagatctcactattacccataccttgtgtgtcatccagcaatgaatcaatgtgaagatctatttcgataattccattcttactcccatgaccggatttcacgatcggctgcgatttaggtttatcaacagatttcttctgtaataaagcaacttggatctcctctgcggaaacatagacttgcttggccggcatatcatctttcacaatatcataaattaaagccggttcttcaaagaagtcagaatcaccgaacgtatgaagtttatagaacttcaccgtatcaatacgtatttctacactaacggcaggtttgatagcagccgttttaccatccttgaaagctaccagttgcacagctacccgttccatatcattcagtacatcttttgtaaactcctccagcaacagttttgtattaggttccaccaatccgtgcgaacgagttttccatgcctttccttctgcgctcaagtaagtataatacagataataattgctatcattcaccaaataagcctcgaaaggagtagtcatcattgctttcgcatcttcgggcacataagccagaaaaacattcagtgtatctccaccacgtacttccggttgacgctgaatgacaggcatttccggttttacgggcttgacaggtccttccgttttcggagtcgatgaaccaggttttcgtttcatgttatagtcatccgtttctatcactacgcactcacgtatcggcatcggaatgtcaaagccgtccgcatcttctaccaaaacaaaatcttttccctggaatccggttacgattccgccacctacttcactaaggaagcgtactttatctcctattttcattgttgcatattcaatttaagtccaaactaaaaaatgagtaacaaagatagagatttctattcaattaaaccgggatttgattctaaaaacaaggaactcgcccttattcgtcttttttattgtaactttgcccaacgaaatacccaacatataatttaagatttcctattaacgacgagaaccgatgaaagaacttattaaagtaattgcctttgatgcagatgacaccctgtggagtaacgaaccttttttccaggatatagaaaaacaatacacagacctgttaaagtcctacggaactcccgaagatatttcggccgctttatttcaaacagaaatgaacaacctgaaatgtctcggatatggcgccaaagcttttaccatttctatggtcgagacggctttgcgagttagcggacgaaagatttcagccacagatatccaacatattattgagttaggaaaatcattattaaaaatgcctatcgaactgttgccgggagtcaaagaaaccctgaaaacactaaaaaaaacaggaaagtacaaactggtggttgctactaaaggcgacctgctcgatcaggaaaataaactggaacgttccggcttagctccctatttcgatcacatcgaagttatgtccgataaaacagagaaagaatatcagcgaatgttgaacatactgcaaattaccccttcggaacttgtcatggttggcaattccctgaaatcagatattcaacctgtcctatctttaggaggatacggagtacatattcctttcgaagtaatgtggaagcatgaagtggtagatagctttacacacgttcaccttaaacaagtaagaagattcgatgaattgctatctctgttttaaaaaaatccggttattctaaataaatggagaaaagattattgccaaaaccgcatatacttatctttttcctgattcagtacagtttcatctacacaatcattcgacctgaaccatgaacactctattgatgcgcttccttttttagcagatttactccaatttcctatcacttgtccctcatgaagaataaccggataaaacaatccattattggtaaatgccttggaataatgctctttcggcaaaacatccgtccggtctttatatcctaacagatattcatcgtatgaaggaagaagatgcaaacgaccggacactttaccgcgagtccggcaagcctcatggacataccatgtttgtccattccattgctctgccgtcaattctgattctattaaatagatagcctgtttagcctccgatacaggcagtccggaccaccatataaaatcttgcaacactgccggagcatgactacgaaaataactcctggccaaacgtgccagtgcttcatcttttgtaatctccggcacaggcggcactcgttcttccaaaagagcataggtatattttccacctttatcttctccgctacaaacaatgccttcctgctcggcacgtaccataaaccgggtcatacgatgattatcagcctcaaccaaaatccccgaacaacaaaagtgctcagcaatttcttgtttggtcaggcttttgtttccgcaaagaatcttctccagcagattataactttttgcataaagctcatcagttatttccaaattataccctttggcaaaagagtcattagccgacttgatgcgctgggcagacaacttcagcatccaacgaatatcctctgccgctacaagatgccatgtcggacgcattacatgagtccgcaagatttcaccttttcgcaacgcttcctctacggtctgaatcgttgctgacttcaaacgcattcccactgcccactttaccatagaataattctgtgcctgcatagctcccaaccaagacacaagctctttcggttggcagaaaagcggattcaacaactgctgattctgtaaacggatattcggtattttcatttagataacttttattgcacaaatataaaacttcctcgctacaaaccaagacaaacaacagaatattgaactttcagaaagaagaatcaaagaaaatgactatttttgtcacctcaaaccaaagaagacagaaatgatgctctataaactcatccctcctccatcggtaaaagcaacgatccagttgcctgcctccaaaagtatcagcaatcgtgcattaattatcaatgcgctgggtaaaggcatttattcaccggaaaatttgtctgattgtgacgatacacaggtgatgataaaagctctcaccgaagggcaagagacgattgacatcatggctgccggaactgctatgcgcttccttaccgcctatctgagtgtgactccgggagaacggattattacaggaacggcacgtatgcagcaacgtccgatacagatattggtcaatgcactgcgtgagttgggagcagaaatagagtacgtccataaggaaggataccctcctctccgtattaaaggttcagtactgaaagggaatgaaattaccctgaaaggcaatgtcagttcccaatacatttcagcattgctgatgataggtccgacactcaaagacggactaaccttgcatttgagcggagaaattatttcccgtccttatataaacctgacactgcaactgatgcaggatttcggagccagagccgtatggacctcccccaacagtatttccgtagccccacaatcctacaaaagcgttcctttcaaagtagagagcgactggagtgcagcttcctattggtatcagattgccacattatctccagaagcggaaattgaactagtaggactgtttcacaatagttatcagggagacagccggggagcagaggttttctcacgcttgggaataacaacggagtttaccccgcaaggcgtaaaactaaaaaagacaggtaaagcaccggaaaaactggaagaagatttcgttgatattccggacttggcgcaaacatttgtcgttacgtgtgctctgttgaacattcctttccgtttcacaggactgcaaagtctgaaaataaaagaaactgaccgcattgccgccctgagaaccgaacttaaaaagttgggatacgttatagaggaagagaatgacagtatattgatgtggaacggtgaacgctgtgaaccggaagaaactccagtgattacaacctatgaagatcaccgaatggcgatggcgtttgcaccagccgtaatctgtcaccccaatatgctaattgccgacccgcaagtcgttaccaaatcatatcccggatactgggaagacttaaagcaagccgggtttctggttataaacagagactagctgcccggtacagtagaggatttcaataaagcatcaaaagcctattaaatcaattatatggaaggggtacgccaaaaaatgtaactccccaatataagataacagaaatcaacaattaataagaaaataaccaagtactataagaactaaggcatttgttgttaatttatatgcctcttataatatactttttagggggaaatctttttcatatatgctaatctttactctgttaaaacagtcttttattattttttttagtattactgcttgattttataaaaaatgtacttatatttgcgaagtaatgttatggaaaccttataccagaagtgggagttttttatatcagcgagacgtgaagatagttcatgattttgacgctatatttctgatttataaacctataattgatgtacttatgaaaaaaagttctctgattgacttaaatgtatttcggaaagttcttataggacttggtatttccagtagcctattctatccgaataatgcgcttgcagactcttacctcacaagtaagaatgaagtaacaacgactgtccaacagaccaaaaagattacaggtaatgtgactaatacggcaggtgagccgataataggtgccactgtattagaaaaaggaaacacaactaacggtactattaccgacattgatggaaattttacaattaacttgccggccaacgcaacgctcagtatttcttatataggatatataacacaagaaatacaagtggggtatcaaacttctttcaaagtagtactgaaagacgatacaaaaacattggatgaaatcattgttgtaggatatggttcgcaaaagaaagctaatttgactggtgcagtttcttccgtgaaaatggatgaagcgctgggggaccgtccgcttctgaatgctgccgatgctttacagggagctgttcctggactgttcgtttctaacggcggtaatgcaccgggaaccagcaagtctttccaaatccgcggagcttactcattaggtgtcaaaaactcggacggaacgtatggaaacacaatcaaaccactcgtattgatagacaatgtggaaggggatatcgacatgattaatccggaagacatcgaatctatcaatgtgctgaaagatgctgcatcagctgctatttacggtgcacgtgcagcaggaggtgttatcctggttactaccaaacgtccgaaaggtgcttccagatttgaattgaattacaacaataactttgcattcggcaaggcagtgaacttaccaaaacaagctcctttaatggactatctgcaagcctatctggactgtggatactctgacgcatactggtcgctaggttcacctagcgtcagcaaatggatggaatacctgactgcatatcaaaaagatccttcttcattcaacacagtaggcgacggcatctatgtagacgaatccggagttccttattatctgaacgaaaaggatttatataagaattttatggagaccagtttccagatgacacacaacatctctgcaagcggaggtactgataaactccgttaccgtatctcgggaggttacaactcgaacgatggtgtcctgatttccgacagagacaaattcgaacgcatgaatgtcaattcattcatttctgccgacgtgacaaagtggtttacacaggagatcacaatgagctatgcccatagtttacaaacctcaccgggaggaatgggaggagtatacaacactcgtctggtttcctattatccggaaggtgaactgcctgcttccgtaaacacactggcagacgaggatttgcctctcttcactccccgcaaccagatattatactcaaacccagtaaacaacaagaacgataatccgcgtattttcctcaaatccattcttaaacctctgaaagggctggaagcggtatttgaatatacctttgataaaaatatatatgattatcactggtacaccggacaatacgactatacaaccatccagggaggaagttccaaatccttcgtagatgattatctgagaaagtacaaacaacatacgaactataattcaattaacgtatatgctacttataacaaagacttcggtaaccaccactttaaagtaatggctggttttaaccaggaatccagctatcaagagacattggatacgtactcatacaatcaggcagtactcgatgttccggcaatgtcatcaggaacaggtacgataaaagccactgattcatatagtgagtatgctatccgtggaggattcttccgcgtcaactacaattatctcgacaaatatctgctggaagtaaacggccgttatgacggttcttccaaattccccaagagttcacgtttcggatttttcccttctgtatctgccggctggcaaattgcccaggagagatttatgaattccacccgtcattggctggacggtttgaagctccgcgcctcttacggtgtcatcggcaaccaaaacatcaatccgtacaccttcaccccgtctatgagcgtaaataataaagccacttcatggattatagatgatacgtatgtaacctctatcagttccctgcccgcattagtaagccagaatttcacatgggagaaagtaggaacaatcaacgtaggattggacgtaaacttgttcaacaaccgtctgagcggagtattcgaatggtatcaacggaacacgaacgggatgcttgcccccggtgtacaattgcctgctgttgtaggtgccagtgccccctatcagaacacagccgatatgcgtacacgaggttgggaacttagcctgaactggagagaccaaataggtaaggtaggctatcgaatcgggttcaatctttccgattataaatcagaaatcattaaatatgacgataatgcagctaccaaattattgagctcctactatccgggacaaacactgggagaaatctggggatatgtcgtagacggatattatactgttgacgactttgtggatacctcttcctggcaactaaaagagggagttacttctatcaacggctataatgtacgtcccggagatgtgaaatttaagaatctacgtgacgatgatacttccaccaacgtaattaccagcggtgacaatacatttgacaacccgggagatcgtaaggttatcggaaacacaactccccgttaccaatatggtatcaatctcggaatgaattatgcgggattcgacctgaatgttatcttgcaaggtacaggaaaacgggattactggatttcaaatgtactcactttcccgatgaacggtgataactttgttcctctttttgaaggattgagtgactattggatgcctaaagatcctgataacggtgattggagtgcagtaaatcctaacgctaaatatccccgcatctacggtaatcgcggcaactccggttcgaatctgagacagagcgacaaatatctgtccgatgcttcctatctgcgcatcaaaaacataaccctatcctacaaattacccaagaaatgggtaaaccagattttcctgaatcagatgaaggcgtttgtcagcatagaaaatgtagcaactttcacttcactaccttcaggtatcgacccagagagaattgaatggaactacccggcattccgtacggtttcattcggagtaaatatcacgttataaattactaatctgatacatagttatgaaaaagatactattatttctaacccttttcacagggatgacattgacgggatgtaatgacagttttttagagaaataccccgtgaccagcttgacggaagaaaatgctttccagtcatacgacaatttcaaagctttcatgtggccttgttatgaaatgttttccaacacaaatatagccacctccactaccgctatcggacgtaattctcactatctcggtgacgtatatgccggatatctggaacaaagaggtgcaagcagccaaaataaatatgcgtttcagacagtgacaaacgcaacctccggcaacggctggaacttttcttccttcattcgccgcattaacatcatgctgtcgcacgtggatgactctaacatgaccgaagaagaaaagaaccactggaaatccgtgggatatttcttccattctttctggtatatggaattgattgaccgctttggtgatgttccctgggtagatactccgttggacgatacttcggaagaagcttacggttcccgtatgccccgcctcgaagtagcggacaaggtattagaccgtttgctgtgggcagaatcgaatatcggcaacacagcgatctatgaaaaaaaggatggttctaacactatcaaccagaactgtgtacgagcagccatttcccgcttcactcttcgggaaggtacctggagaaagtaccatgaactgggaagttacgacagatatttcacagaatgtaagcgcgtttcgaaactgttgatgcaagattatccttctctgtatacaggaacagacggacaaccgggtgccggttatggcgaaatgtggactacggacgatttgagtacagttccgggcgtcatcctctaccaacaatggttggaaacaatcaaaccgggacactcatgttattacgaacacacttcttcccacgacatagagatgcatcaaggaacggtagatctgtatctttgtaaggatggaaagactatttccaattcagaattatatgccggagacaaagatatctattcgactttccgtaacagagacccacgtatgtaccatactatcatgccgccctataaagtagtggacggtaaaggggactataccacatggtcgtataccagcgatcctgccgaccgcgaatatattgacatcatgggtccaaacgagtcatgcagtaatccgggagtgggcatgaaacgcttgccgggacaaaactggagtgcttcgttagtacgacgggttcccaacttgcaaggcggtgcacaatacacaatcgaagggaagaaatacggaccgcatgcttatgttgcctgccgttcgggatactacgtatggaaaaattgggataactgggaagagaactataacaatgcacaggtaaatacagccgataaaccgatcttcaaaatagaagaaatactgttgaactatgcagaagcgatgtacgaaaccggcgcatttgaccaaaatgtagctgaagaaacaattaacaagttacgtacccgagcaggagtagaaaagatgacagttgctaatattgacgagaatttcgatcccaaacgtggcaaatactatccgaaaaacaatacaacgggtatcttggtagaccctgtcctttgggaaatacgccgcgaacgcatcatcgagttaatgggtgaaggattcggtttctatgatgtgcgtcgttggagaatggctccatggtttgtaaatatgcaacagaaaggtatgtggatatccaaaaacgaactaagttcactaaccctactgaacgaaacgaccggaacatcggacggcgccaatggttctatgactgaaggatatatctatctgttcaacgatcctatcaaagaaggtaaaggatggcttgaaaaatactacttatatcaggttccgctggaagaaatcgcgttgaaccccaacttaacacaaaatccgggctgggataaagaataacagttaatatcggcctactataaatatttcagctatttctccttcccccagagtagaaatagctgaagttttttataacaatgtactgtttctaatagccttcttcatttgctattttccatatccaaaagaataaacccttcagaacttatttcctaaagacacgttgtaacagagagttattctttttcgttctgtattcatatataccctgtttcagcttttgcacaacctcttgtaaatctgtaaccaaaagagaagttgaatcttgaggagaatcaaacaaaacaactctttgattcttagaatctatatacatatttccaaaacgccttataaaatgatttgtcagatagccattataaatctcctcttttagaaaataatcaggcaatttatacataccaacaccagtcagatgctgattattaaacttcattccagaagaaagtattagaaaaaccgagtcatccaaggaagtcgaaatccggccatgctcctccatttcaggtattttacccgatgttgttaaaggataagtattataataatcttcatataaatagttcttcagtttatcctccggagaaaatggtaaaagcaaatcacacataagcttataatctccaactgaaaccggttgggaatacaggcctgagtctaatataaacctcattggcatagtatcattaatcaatacatcagcacacatattgtttccaccacaatctattcgcatctccaaacaacttgctcccaaagataacgggatatctacatcgtaatcagctattaataatttatttgttcgaaaattgaacaaccaattatattgatttattaaagtgcgccctataactgccccactgagattcttaccacttacaccatagtgtttcagttcccctaccgcaaaaatatttgttactttactagagtctatctttgaaaaatctttttctccaatacaaaaaggcaccaacaccgctggaacggaaaaacgcccgatagaatccttttttttaattccttgctctattttctctgccagttcctcttccctctcatttcgaagattatactttactgccaattcagaaagaatagttgagactccagccccagtgtcaaatatataccaatgaacatcaccattgatagtcaatggaactttaatatatgaatcatgttcaaaagtaacctcagtccaactacgttgctcggcacaagatataccaaacaatataagtattatcgttccagccagatgtctcagcatagtcacacattttgttgtgtcagaactctctctcattcgccattttccacatgttaaggaaggacgccttagtgatttccacaatcttatcccaattcaggcggtcggcatgatcggacggttggtgataatcgggatgtccgtcagtatgataccagatgatcggaataccagctttagcaaatgaactgttatcacttcctcctacgggattatcccatgcgcggtaatccggtgacaaccgcaaaccatacttcttgatatcttctttcaaccaatctccaaaaaccggatgagcagccgtataaaaataaacaacgtgttcaggctgttgcggtttgttattacgacctatcatatcaaagttcagatagcctttgattcgagagatgaaagggcaagtttgcacaaaatatttggagccaagcaaccctttttcttctccgtcccaaaatgcgaagattacatttctttccggctgctttccagtggcaacaaatgcccttgctatttgcaatacagcggatacaccggatgcattatcatcggctccgttataaatctggtctccgtcgagagctggatctatgcccaaatggtcaaaatgagcacctacgattacatactcttttgtatttttaccgggaatcatgcctaatacatttctcatggaaagcttttgatgaacctcctgcttcagtttagcaatagaatcgggatgaacttcgaggcgacctttcttttgcctttctttgcgataggcttcaaaaggctggaaataactttcattcagaggctgcactcctatccattgcaataaagaaacaatatattccgaagctacacgcgagccatggaatccggcttcgcgtccctgcaactcgtcacctgctaaaaaattaataatagcttcagtagaagaacggctaatactttgcaatcctttttccatgtgagactgagctgatacaaataatgcaacattacacaaaaagaaaattaacaagactttctctttcattatattcaagatttaaaggtatatacgcaatatcgacaaacaaatattcacacgatcagtagtttctcattcataagaagtcgcctttttactatcttattcctcatcaactatccaatttttctctttcagtatttcttttaaagactccttatttccagggttatcactataagagatccggcattgaggaggtctcggatattcaggagtcggtttcggaacttgtcctaaagaaacaaacaaagtcttcaaggcagcctcacccagttggttggaatgacaatagagatgtccgaaatattgtccttccggaactaataaacgggttaaccgattatggtcacaatgtagttcccttatagataaatgcttagtcaaatcaagttccgtcaatctgttaccggaacaacttaactcattcagagaagggcaacactccaagacatcgtcaaccgactgaaaagcacacccacttatcagtaatgcattaatcccattattctcatctagttccagactcgccaatgcactattatatcccagatccacagaacgcaatttgggtaaaccttttaatgaaaaggaggagaaaccattataagaacaatacaattcttccacttccggatgattgccaagctccattgaagttaatttaggattagaataaatttgtatattccgtaatcgggaacaatgctcaacctccaaatgttccaaatctgcgaaactaccgatattaatactttctacattaggacaaaaagtattcaaattcaattcacgggtatcggtaatactattcagaaccaaagatttcattctcggcatattcccaaaatgcaaatcacttatagaaatcaacagaccgcttatatcaataagttgtagttcttcagcccagattcttacgttatacgatcctttattaccatatctatatgtcactccgccagccatcgaagaaggatcttcaactttctgcattcgaccgtttccccagtctattaccattcgtccaccgtctgcaacaatgttcaattggcgccaatctcctgtaacattcactgtaaaacgaatcgtatttgcatccgttagtaccggaaaatcaaaatcatctccaaacacactattatccgtatctttacaagaaataaagatagtagataagataaatacgtaactccaaacgaacaatagactctttcgcttcattacttattatatttaagttagcaacgtacaaaagtacgaaagaaatagatagcaactataatagaatacaaataaataagtaactttgccgaaaattgatttgatataactatgtggatactcattataagtctgatattgctgggtatcattgcgctgattgccgggtatatccgcaacaaaagactacaacagaagatagaaagaggcgaactggaccgtatgccggaagtgaaggaagtggatgcagaatgctgcggccaacacgaagtatgcgaacgggatagcctgctggctgccgtcagtaagaaaatagagtattacgatgatgaagaactggaccagttcatcggtcgtgaaggcaatatgtatacggaagaagaaacagagcagttccgtgatgtgttatataccacaaaagacgacgaagttgccggctggatacgtagtcttcaacttcgtggtatcgagttgccggataatctcaaagacgaagtatttctgattatcggagaaagaagaatatgaacctattacaatatacattctttcagcacgccttgttggggagcctgctggcaagcattgcctgcgggataatcggcacctatattgttacccgccgactggtgtttatcagtggagggatcactcacgcctctttcggaggaataggattgggactgtttgccggaatttccccgatattgtcggcagccgtcttctccgtgctttccgcctttggtgtagagtggctcagcagacgtaaagatatgcgcgaagattctgccattgccgtattctggacgttaggaatggcattaggcatcatgttcagtttcctgtcacccggctttgcccccgacctgtccgcctatctgttcgggaacatcctgacaatcaatcagactgacctctggatgctcggcatattggctctgctgttaaccggatttttctatctgttcatccgtccaatcgtatatatcgctttcgaccgggagtttgcccgttcgcaaaagatcccggtagagatattcgaatatctgctgatgatgtttattgcgctgaccatcgttgcctgccttcgtatggtaggtatcgtgctggccatctcgctgctcaccatcccgcaaatgatcgccaacctgttcacttacagcttcaagaaaatcatctggttgtctatcggcatcggttttctgggatgtctgggcggattgttcatctcctaccattggaaagtcccttcgggagcttcaatcatattcttctccattctgatttatgccgtttgcaaaattggaaagagttgtttcaaaaaacagtcataataacagattaatatatggaaatcaagattcaatcattagaaagtatccacgaagcagcccgtgaatttatcgctgctatgggcgacagcactgtattcgcactatacggaaaaatgggagccggtaagactacattcgtcaaagccctttgtgaagaactcggtgttacggatgtcatcagctctcccacgttcgctattgtcaatgaataccgttcggacgaaaccggggaattgatctatcactttgacttttaccgcatcaagaaactgagtgaagtgtacgacatgggctacgaagattatttttacagcggtgctctttgcttcatcgaatggccggaacttgtagaagaactgctgccaggcgatgccgtaaaagttacgattgaagaactggaggacggaagcagagtcatcaaactatgaccggacaatatatcgtacaaggaatttttgcactggcagggatcatctccctgctggcgtcattgctcaactggaactggttctttaccacccgcaatgcacaaaccattgtccggaacgtagggcgcaaccgggcacgactcttttatggaatactcggagttatcttaataggaatggctatcttcttctttgtagaaacacagaaagctatagcaattgccgtgacttcatctccaagtacttattaatcacatcaatcgaaagattctccggcgtggtcaataaagaatagattccattctgcttcaaggtggaaacaatcaaccgtttttcaaaagcaaacttctccgctatgacatggcgatagtagccttccgtatccctggcagggttggcgatatattctttcaaatcggcatcctcgaaaaagaccacaagaagacggtgctgacgattcagttgtttcaaataagccaactgacggttcatgctccccatactggagaaattagtatatagcaccaaaagactgcgcttgctgacatgcttgttcagatgaacacaaagagcggagaaatccgtttcgccaaaagtagtctgctggctataaagattttcgagcaatgtctgcatatgtccgggttgcttggaagccggcacaaaggtgtcgaaatgttcatcgaaagttaccaggccggttttatcatcctttctcatcgcaacatacgaaagcaccaacgatgcattgactgcataatcgagtaacgtcataccgcgaaaagcttgctgcataatgcgccccttatcaatcacattataaatttgttgggaacgttcatcctgataaacattcaccattagctcatgccggcgggcacttgccttccagtttatcgtccggtaatcatcccctttgacgtattcctttatctgttcgaattccgtatgatgccccactctgcgaatacgctttatccccaattcggtcagattgtcgctcatagccagcaactcatattggtgcaacatcagataagaaggatataccttgatatccaacggctccccacaagtataacgccgggaaatcaatccgatccgaccggttacaaacaccctgatccgcccgaaagagtaaacaccccgctgcgtagggcggagacgataactaatcgttttcccttcatttgcctgaagctgtatccggaaattgatattccgctgttggaagataaaaggaatctcgtcgataatctccaaagagacgggacgcggataactattttccacacggatagccacttcgttttcatcgccattggagaaacggtcggcacagtgacgttctgcctgaatcgcgttggtacgataaagtagaaatccgtccgccgacactaacgcaatcaaagccacaagcgcccactgcccgacaacaaacaacggagcaaacgcatatccgctacccagaaacaggataaccaacacaaagacaatatagaaacgattcgttaaatacaacttgtctgctaaaaattaagagttaaaaactaaagaccgtaatcggaacatgacagttggactatcatgcattatctatttcggaacctcaaccttgtcaatcaaacgctgcgtcaccttcaccggagaatagccttccatttccgcttcggcagtcagaatcagacgatgttgaagcacatacggagccacaaacttaatatcttccggtgtcacaaaatcacgtccctgcaagagagcataggctttggacgcctgcatcatagcaacggacgcacgtggagaagctcccagatacacagctttgctggtacgtgtctgctgcacaatcagggcaatgtactgaagcaacgtgcggtcaacaaacacattcttcataaaagcacggagcgtcaacaactcttccttcgtaagagcaggtgtgatatcatcaagtttcaccaaggcggcattggagtgatgacgttccagaatattcacttcttcatccaatgagggataatccatagtaatcttcatcaggaagcggtcgagctgcgcttcgggaagtttgtaagttccttcctgttccaccggattctgggtagccaaaatcgtatagagttctcccattcggtgtgtcgtcccgtcaatacttatctgacgttcttccattacttcaaacaaggccgactgcgttttggcaggagcacggtttatctcatccaccaatacaatatccgcaaatatcggccccttatgaaaatcaaactcattcgtcttcatgttgaatacggtcgttcccaacacatcgctcggcattaaatccggggtaaactggatgcggctgaagtctgcatcaatcaaccgggccgtgagacgggccagcaacgttttcgctactcccggcacaccttctatcagcacatgaccgtttgccagaatagccgtcagcaccaagtccaccgtttgttcctgaccgactatgacggaggcaatccgttctttcagtccttgtatcttctcggaaaagagagttaaatctatccgttgttcagtgttctcttccataagtttcttctttatatatgattgattatttcactcattttatctatatacagtttcatctgttccgcagaaatgacgcggccgccgtaaatcaccgggcggacttcgcggacaaacgtaccgatttcctccgcatccattcccgtcttctgcgcaatccggcggaaagagcgttcatcgtccgccacttcctctatatccacctgaatctctcttctcaattcttccgcaaagtagataaacttcttatggaccaagtctgcatgatctttcttctgataatacagagtccctatcagttcggtaaactcaagggatttgttttccggttcgcggataaccggtattacacgttgccgtctccgtaccgtaaatatcataaacagcaatatggcaatcatcgtcagatacaacgcccagcgaagcggttgccgggaaagaaggtaaaggaaaggagactgctgcgtttccgccgtctctttgacatatccttcggtacggacaacaggaaactcgcccatttgagataacaagcggaatatgtaagccgaattattcccgtcgagtataccgtaattggtaaaaatcaaaggagtggagacaagaatcacctcccctttcccaaccggacaggtcatagctacaggaacataacgaagtgtgtcctgctccgattccgtagatacggaatcgacttctacctcataccggtactcattcacatgaagcgctttcctcgccaactcttttcccggcaacgaatcgccccagaaataggaggaacaaagctgagggtagaaatagaacgttcgcggggaatagactgccgaatctcccacccagcataaactatcttttgccaacaacgaagtggcatatttcttgagagccaacggactgaaataaaaacgataagattcaaagttcaatgtatccttcaagtaccggctgaacatagtgctcgccagcataaccttatttccccgttccgccattttcaggagagacttcacatcaatgtccgtcaatgccatgtcatgggcaactgccagtattccccggctatacaacgtgtcttcctcctccaactgatagaatgtctttttcgacaatgtgtatccattgggcaaagaagcagacaacaggctatcgaacaccgcacatccgaaaggctggtcatcataatgaccgaaagtaggtgtccacacaaacttcttcggcaggtgatattccacagcgaacattatgaccaaaaaggctacaatgaaaatgataaaccagtggcttcctttcatacagcgcctcctttctctatttcttcctgcaatgcctgcatctcacggaaaagttcttccgtcgcttcgaagttaccgtaacgtacccgcaggaagtggttggtcatttgccggaaagccggcagccgcacttcatagatatattgcgtaggtgtcttataaagctgccagtcaatacgttcggcgtcgctcaactgtttcagtgtctgcaaatagagcaaacgtatcgcttccctgtaatcccgacgggacagtgcttcatcaatgcctttcggaaaatcaacgccataaatggtatcttcctcaacagtatacggaagtgaatttttatgcgaacgcatgaacagttcgggacgttttttgtaaacaaaccaaacaatcagaagcaaaagaagaatggccaggcaaatcatgataagcccggaatactcctccgcaaaacggctaccgaatattttacccaacaactccccgaactgaccgcgaatccactcgaaaatattaatttccggagttatcagctcacgattataatcatacgcagcatcggaccggaaagccgcaagctgtgcagaatcacaaaccaatgtatcagccggggaagttatcatctacctgaacctgtttttagagtttatcaaaattatcaatatcagtttccaccgtaatgctgtccaccacttccgaggcgtgcccgtattgataagccatgccgacaaaggtgaaaatcattgccaggtaagcgccgaatgtctgaataatcgccattaagtagaggaagaaactatatcctgccgatacagtaacctcaccgcttccaccgacatcactcattgcaaaaaagtacttcacgacagtagcaatataccaaggcatcatcgttactccttgcaggacgttagctataattcccattaacaatgaaactagaaagacacctccccaagtagcaaatcccaaccggaaagttttcttgaaagcctccattaaagtgatatcctcaaacaaataaatgggcgccaacagagcaagcggtacggagaaagctatgataaacggaatagtcagaaacaatgtgaaaggcgtcaaagcaaccagaagacctacaaaaataccaacaaacagtaccagtaacatacaagcacctgtcatcagtagcagtctttttatattacggaacaaccgaggtttcagcatacccagagttactccctgcaagcgttcttcgcgttcattatatgtccggatcagcccatagaccaacgatgtcaggaggattattccaatcagataaaggaacatatataatccataataagagccgaaagcaatgagcgaagaagaagacgcagccattgccgtactacttgcgatagcagatatcgacaatgccccgctcattaatccgttcaggctcaacgcctgaatgaggcaaagaggcaacaacagataagtagtaaacttcaacaacaatttccaattctcttttagaaaatcaaaagaagcgtttaacttttcaccgaaaggacgtttcacatacatcgcgatcttaggtttctgtgattccatgtttttttctatttggtaaataaatatagtagaaaataataaatgacaacgaaagcagaatgaatccaagcctcaacagatccggcagttccgtatgtcgggtgacaaagccttcaataaaacctgccattacaaatacgggaacggtacctatgacaatctttactcccttctttgcaccccgacggaaagactccaaccgtgaataggtgccggggaaaagccaaccgttacctaaagccagtccggcggcaccagccacaataattgcccagatttcaagcgttccatgcagccagatagcaagactggattcccaaagcaaatcgtgctgataaaagaaggtttgaaaggcacctatcatgattccgtttctaagtaacatatatcctgtaccgaaactagtcaacagccccattgcaaaacaattgaaagaaaccatcacattgttaagcgtaattcccaggaacatcggcacttcgtccgagccgttgtagaccgccattggctcaccgttggcaatattatccaaagtcatatccacatagccgttccctaaaatcaggcggacaaagttcgggtcattcgcagcggatatcactcctatcagcacgctgacaataaagataatgaaggaagtcagcagttcacgccgggcatcatacattgtctgcggaacttcacgcgtccagaacgtgatgattcgcgaccacttttcccgtttgttccggtaaatctcgttatgcagtgccgaagcaagattattcagatagatagtaatgcgtgaagtcggaaaatgtgtctgggcaaatgccagatcagcagtcagatccgtatatacgtcggcaagttggtcgggagacaagcccgcggcctgctccactaccttttcggtttccttccatttttcaatgttccgacggataaacgtaacttctttcatgctttccaagggatttcggataagttttgtccgaaaccggaagcaaaagtaagagaaatatgatatatttgcaacggaatcctaagaatgtttaatcagaaatggcagaatctacgattataaccggccaattcgtccgtatcagccagacgcccgccagtattggcgaacgactgttggcattagttatcgattatttcctaatcgtaatctacgtatattctactgccaccctcttaaccgaactgcggttgccttcgggatttaccctcattttctttctctgcgtcatttatttaccgatactcggttattcttttctttgcgagacattcaaccacgggcagagtttcggcaagcgtataatgaatatccgtgttgtcaaagccgacggtaccactcccagtatcagctcttacctgttgcgctggctgctttttcctattgacggtccaattacgggcggtttaggtattctggtggtcctgttgacaaaaaacagtcaacgaatgggagatcttgctgccggaacaatggtgattaaggaaaaaaactatcgtaagatacacgtcagccttgatgaatttgactatctgaccaaagattatcatccggtctatccgcaatccgccgatttatcactcgaacaggtaaatgtcattacacgaacactgcaatccggtgagaaagaccgtccgcgacgtatcttgctactagcccaaaaggtgcaggagttgctttccattactccacgcgacaacaatcaggagaaattccttcaaacagtgcttcgggattatcagtattatgcattggaagagatataaagactactttatttactgcccgttccctttgtaccaaagatccgtagcgatgcgttcattgtcgtttccgcacttgggaactctagtttccacggttagaaatttcaatttccctacgcagaaagaggctgtctcaaaatagaaaaatgaagtgaccccaaaaatttggactggttaaacattatccagttatagaaagagttcggtattgtactggactctttccttttaaccgggacttgattcttttattattataataatctatatattcttccaaagcctttgtgaagtcttccggagactcgaacttttcagcgtatagaagctcagatttcataattccgaaaaaattctccatcatagagttgtccagacaatttccctttctcgacatactttgaattatatgatgcccttcaagccttttccgatatccgaagtgttggtattgccaaccttgatcagaatgaagtacgagtccgtcaaggttatcacacttatcaaatgctttatcgagcatgtcatatatttgttcaagattagggctgttagatatgttatgggaaataatctcaccattcaacatatcaagaataggcgacagatatagtttcgtagcccctatatttatctgtgttacatcagtcgcccatttacggtttggctcagtagcaacaaagttacgcccgattatgtttggggcgagactgccaacttctcctttataagaacgataacgcaccttgcgcatcttgcatttgatatgcatttctgtcatgagacgctgcacggtcttgtggttgatgacataaccacggttccgcatctcccaagtgacacgtctatagccataacgtcctttgtgctcatggaaaatggatttgatttcttctttctccactgcgtatttatctggttcctcaagccgtttcagatgataatagaatacggaacgagccatctttcttaactccaataataagtcaagaggatattcggaccttagttcgtcgatggcttctgcccattgagacgtgcccgggcttcctgttcctcgactaaggccttcactttttttagtaacgcattctctgccctcaggcgcaagttttccgcctgaagcttttccaattctgtctgaggttcttttttcttaggtcttgccatagtttgagaaggtctgcctttacgtctaaatatatgtaattccggatatccatgtttacgaaccgtacgaacccagccttcaagtgctgtacggcttatacggtactttatcaatgcatgggacaaaggtaatcctttttccaatatctcgcgtacaacctgttccttaaaatcacttgtaggctttatcttggaacgttttcttaggatatcaaccccgtatctatcatataaacgtacccaatcgagaattttattctcgtgtaggttgttttcttttgccaactgtctaattggacaaccggcttttaccctgctcactatattgagctttttttcaaaagtgtatttcataaagaatgcaccccaaaagttttttgtctaacttttggggtgcacttcaaaatgaggcagcctcttttattttgtattatccactatgagaccggacaccgcgttctagtccgcttgtcccagagagtctccgtattccatttctccctgaaccacaaagaggacttcttcgggatcgtattctcccatttcatcctttttggcttcttttacgatgtaagccaccacttcttccaagtcgatgtcaacgtagccgtcttcatcgggttgagcgtcgagaattccactttcagagtaatactcgtcgattaagtcaaggaaataatacaactcatcgtccgagaacttctctttcagttcttgaggcagatagtttttgataaactcgatggtcttttcatcatcggcatctgctaataaaaaatcgtcttccagtcccatatattttaagtcttaagtatgatcgactataaaagcttctttactttttctacgaatacaggtttgccgactgcaccgacctgcttgtccacaatctcaccattcttgaaaaacaggacggtagggatattgcgaatgccgtattcggcagccatatcgccattttcatccacatcacacttaccgatgattacttgtccttcaaactctgctgccaattcttcaataataggagccaccattttgcaagggccacaccaaggagcccaaaaatcaacaacaaccggcttgccttctgcaagaacttccttatagttgctgtctgtaatttctaaagccatttcttataagtattaagtttattattaatatatatcttctcgtttttattgcgctacaaatataatcaatttatgcggaatccaagttccggacgctcttttaaatatgttattaaatctcttcccaccgaaagtttgatggggcgggaaatcagatcgaccgacatgtggttggtatcgctgtcatctgtcaccttaaaataaagttccgtattgcccggagactctttcgtgagggttgccagttcagtaaccaaagctgtattcaataccgacaaaggaataataatcgtgattttctgtaccagttcttctttcacatccggaagaagttccatagaggtaatcttgatttccagttcatcctgccgccactgtttggcttggcaacgggccttgatatacagaaaagttccttcattgaggtacccttgataagtcacccagtcatttccccaaaacgggatttcggtagagccggaatagtcctcaatcttggcaatgccatacggattaccattcttgctgactccacgacgaacactggtcacaattcctcccatggttatttcgcgtcctgccagggctgctttatcttccagttcgctcatacgagtattgcaaacgtgttccagcacaatggaaaattcatccaacggatgagcggaaagatagataccaaccaagtcacgttcacggttcaggcggtcgagatcgctccaacgttccactccctgcggaatttcgggggtagcgacgtcaattacgttttcgcctccgaacagagaattgacggcagcagctttgtctgcctgatagcggttgccataacgcatcaatgtttccaagaataattcacctttcgagttagcggcaaaatactgttcacgtttcagttccgggaaactgtcgaatccgccggccaatgccaggcattccatatttttcttgttacaggcattcaggttgacgcgttgcacaaagtcgaagattccaaggaaaggaccgttcttcttgcgctcctccatgatgctttgtacagcagcctcacctactcctttcacggcaccgagtccgaaacggatattaccatcatgatttaccgtaaacttcaggttactctcatttacatccggtcccaatgtctggatacccattgccttacattcgtccatcaacttcgtgatgtccgtgatgttcgacaagcttcggctcattacagccgccatatattcagatgggtagtttgctttcagataagctgtctgataagcgacccatgagtaacaagtagcgtgtgacttattgaaagcgtaagacgcaaacttttcccagtccgtccaaatcttttcaagtactttcgggtcgtgtccattcttacgtcctccttcaataaatttaggtttcatgtgatccagcttgtcacgcaacttcttacccattgctttacgaagggcgtcggactcaccacgggtaaagtctgccagcagacgtgacaaaagcatcacctgttcctgatataccgtgattccgtaggtatctttcaagtatttctccataaccggaatatcatactcgataggcttgcgtccatgcttgcggtcgataaaatcaggaatataatccataggtcccggacggtacagagcattcatggctatcaaatcctcaaaagtagaaggctgtaattcgcgcagatacttctgcataccggcagattcaaactggaatgtaccaattgtgcgtccgtcactatatagtttgtaagtggcagggtcgttaatatctatctggtctacatcaatttccaagctgcggctcaggcggatattctcgacggcttccttaataatggaaagagttttcagtccgaggaagtccattttgattaatccggtatcttcaatcaccgaaccttcatattgggtgacaagcattttttcacctgtctccttatcatcggcagtgctgacaggcacccagtcggtaatatcatcacgacaaataatcgtaccgcaggcatgcacaccagtgccacgaacgtttccttcgagcatcttggcatacttgatcgtatcccgtaccaaaggatcggaagaggcttcggcagcctgcaactccgggacatattctatcgcattgcggagattcagtttcttatcgggaatcttatcgggtactagtttagccagacggtcggattccgagagagggagtttctgcacacgggcaacgtccttgatagccagtttcgtagccattgtgccatacgtgatgatatgagccaccttctcttgaccatatttattcgttacccaacgaagtacctcgccacgaccgtcatcatcaaagtccacatcaatatcaggtaatgagatacggtccgggttcaggaaacgctcgaacagtaagtcgtactggatagggtcgatctttgtgatacccagacagtaggccaccgccgaaccggcagccgaaccacgtcccggacctaccgacactccgagctctttgcgagcggcgttgataaagtcctgcacaatcaagaagtatccggggaaacccatcgtcttcatgatgtacaattcgaagttcatacgctccttcacttcctccgtcaacggttcaccatatattctttttgctccgtcgaaagccagtttagccagatagtccccttcaagtttgatacgatacaatttatcatatccgcccagacgcttgattttcgcctttccatcttcttcactcaacaccacattgccatgctcatcttgagtgaactcatcataaaggtctttctccgtaaacttctgccggtattcttcttccgttccgaaatcctcgggaatggcaaaagtaggcatgataggggcatggtcgatagagtaatattctactttatcgagaagttccaatgtattgctcaacgcttccggcacatcggcaaagagctcgttcatctcttctcgtgtcttcatccattcctgcttggtatagagcatacgggtaggatcatccagatccttaccggtactcaaacagatcagacggtcatgtgcttcggcattttcttcatccacgaaatgaacgtcatttgtacaaaccaacttgacattgaacttcttggaatattccataagatatttgttcacttttacctgcaaagggtagcactcgtgattggcccggggaacagttgctttatggcgctgcatttcaaggtaaaaatcatcgccgaacaggttcttataccactgaatagcttcttccgcttcggcaaactggtcattggtaatccgcttcggtatctcgccaccgagacaagcggaacaaaccattaatccttcgtgatatttttccagttcgctgcggtctgtacgcggacgcatataatatccgcgcgtccatgcgtgcgatactaactttataaggttatgatagccagtctcattcttggctaatacaatcaagtgataaccgctctggtcctgtttgccttctttcagatccattgtgcggcgggcaacatacatttcgcacccaataatcggtttgaacagtttgttttccgcctccactatctttgctttacaagctgcaacctccgcctctttatcttcacactctatggagccggcttcaattcccaccaaccgttttttcaggtccttgatttcacctttcggaccactattcttcttattgacgtagttcgtaaattccttaataccgaacatatttccatgatcggtcacggcaatacccttcattccattctgcattgctttatcgaccagacgagcgacgctagcctgaccgtccaaaagggaatattgcgtatggacgtgtaaatgaacgaaatcctgcataatgataagtctttatttgaaggcataaaattactacctcccgcgttataaacaaaaataatcctcaaaaagttatcaacattcacatttctatgctgaattacttgctgattttttaaattaagtatatttttgcagacaatatcattaaacagcattcatgggtcgactaaagaaattaaaaaagatacgtattcaccgcgaaggaacacatatattatggggtagcttcttgctgctgctattgattaatgccgctctttattgggggatcgattgcaaaatacctttttatgtggtagcagtggcgagcatcgttgtctatctgctaatggtgaacttcttccgctgtcccatccgccttttcggacaagatacggaaaaaatagtcgtagcccccgccgacggaaagattgtcgtcattgaagaagtagacgagaatgaatatttccacgaccgccggttaatggtttctatctttatgagcatcgttaatgtgcacgccaactggtatccggtggatggaacaatcaagaaggtcgcccaccacaacggtaattttatgaaagcctggttgccgaaagccagcacggaaaacgaacgttcgacagtcgttatcgaaactccggaaggagtagaaatacttacccgccagatagccggggctgtggcacgccgcatcgtcacctatgctgaagtaggcgaagaatgttatattgacgagcacatgggattcatcaaattcggttcccgtgtggatgtatatttgccccttggtacagaagtttgtgtcagtatgggacagttaacgaccggtaaccagacggttatcgccaaacttaaataattcggtcgcaatgacaaacgttattaaaaataatattcccaatacagtaacctgcctgaaccttttctccggttgtatcgcctgcgttatggcttttgaagccaaatatgagctggcattacttttcatcgttttaagctctatcttcgatttcttcgacggactgctggcacgtgcactcaacgctcactcaatcatcggaaaggatctggactcattggcagatgacgtcagtttcggtgtcgctccttcattgattgtcttctctctgttcaaagagatgtactatccggcaaccatggagtttattgctccttacctaccctatgcggcatttttgatttccgtattctccgcgctgcgcttggccaagttcaataatgacacacggcagacaagctctttcgtagggctgccagttcctgcaaatgcattgttctggggttctttagtggcaggcgcgcatgacttgctggtctccgaaacctgtcatcctgtctacctttttatattagtatgtctgttttcgtggctgttggtatccgagataccgatgttttccctgaaattcaagaatctctcatggaaggacaacaaaataagttttatattcctgattatctgcattcccttccttgtatttctggaaattgccagctttgcagccatcattgtatggtatattttactttcactttttacaagaaaaatgaaataaacaatctcttggcacgtttgttgtactatgagttttatcaaagttacaactaaaaaatcatagcccgatgcatatacttttatttatactcttttttattattgccattatcgtatttggcctctctattgtaggatttctgttaagaacaattttcgggatcggacgccgttcgtcatcgtcacatcacgggaagaccggacaaagccaacaaagctacaatcaagggtcgtacaattctaatgatgatgaagaggaaattctgtccgagaatacttcggcaagaaagcacaaaaaaatattcacccaagatgatggtgaatatgtagatttcgaggaaataaaagaataaattttattttcgtttcgccgcaaagaattctctcataagagcagcacattcatcagccaatatgccttttacaacaactgtcttaggatgcaaagcgtctgccgcatatctctgatatccgcgtttttcatcttcggcaccaaacactagctttccagtctgcgcccaagcaatggcaccggcacacatcacgcaaggttcaacagtaacatagagtgtgcattcactcagatacttaccaccaagcacattggcagcagcagtgatagcctgcatttcggcatgagccgtcacatcattcaacgtttctgtgagattatgagcacgtgcaataattcgttccttacagacaacgactgcccctaccggaacttctccccgttcggcagctttgcccgcctctatcagggcttgtttcatgaagtaagtatcgtccagcatcttcttatcgtctcatatcatgttctccgaaaagggtcggataatcttcttccatattcttgtgaataaacatgagaatcgtctcgcgaagccaacgtgacttgttcgttatcttatacttctcaagataacgatcaacaatcagttgttcgtcgtcgctcaacaaaatgctcatccgccgttcccgtttggtgcattcgacgtgcattttcaggcactttttactcctttttctcatatcttctgcaaaattacttttacttctgtaaaaacaaagaataaaagcagtaaatttgcaaaaaaagatggccaaacataatgatttagggaaagccggagaaaacgcagcagcggcttatcttgagaaggaagattatctcatccgccaccggaactggcgtaaaggacatttcgaactggacattgtagcagcaaaagataatgaactggtggtcgtggaagtaaagactcgcagtaacaccgagtttgctcaaccggaagatgctgtggatgtaccgaaaataagacgtacagtacgtgctgcggatacgtacataaagctatttcagattgacattccggttcgcttcgatatcattacggtagtgggtgaaaacggcaatttcgagattgagcatatcaaggaagcatttcttcctcctttattctaagaagttccgaggctcatcacagaaaatacagagtaacacggagtatacagatttattatataattattagttatgaacgtagaaactgtcagagaatactgcctcagcaagaaaggagcaactgaatctttccctttcgatgatgtgtcacttgtcataaaagtgatgaataagatgtttgcccttattgatctggaaggagcaaacagtattgcattaaaatgtgatccggaaaaagcgattgaactgcgcgaacattatgccggcatcgaaggagcttatcatttcaacaagaaatactggaacagcgtccgcttcgacagtgatgcagatgataaacttataaaagaactgatcgatcattcttatgatgaagtaatcaagaagtttactaaaaagctacgtacagaatatgatgcgctcccctaaacgatttccggtcccattggttcatatcaatgaaacgaactctaccaacaattatttgcaagctctttgcgcacgacaacaaacagaagagttcaccactgtggttgcagactttcaaacgtccggacgaggacaacgtggcaattcgtgggaagcagaacctgataagaaccttcttttcagttttgtgatttttccagtctttttggaagccagacaacagttccttatctctcaaattgtatcattagcaatcaaggaagaactggatacttacaccaccgatatttctattaaatggccgaacgatatttattggaaagataagaaaatatgcggaatgttgatagaaaatgacttaatgggaagaaatatcagccaaagcattgcaggagtaggaataaatatcaatcaggaagtgtttcacagctctgctcccaatcccgtatcattatttcagatcacaggaaaacaatatgatatattcaatatattagagcatataatgctacgtattcaaatttattacgacttacttcaaaaaaacaatacggcactcataaccgcccaatatgaaaggtcgctttttagaaaagagggaatgtaccggtataaagacgtcaatggcgaatttatggctaatattgtttgtgttgaacctgaaggaagactcattttagaggacgaaacacaaacaaaaagaggttatatgtttaaagaagtggaatatttattgaaataagtagtccacgaactgatttaaacattatctttggaaccaatgttttatatgaaaaactcccttatttatgaaaacaagattaattttcctgcttccattattatggttgcttattggctgtgaagattccgaaccggagtcaaaacaggattccaccgatcctccactaatagaatatcattatgaacttccagttgtctttcatgttctctatcagaatgaacaacagaatattaaaaaaggacgaattcaggagatcataacagcctgcaataaatattatcaaaatcgtttgggcagtaacagcgtagatatgaaccttgaatttgttctcgccacagaaaatcctcaaggggtaaaacttgatgagcccggtgtacatccaattcaagtaagtaatcctgtgcaagactgtgaggtttttatgacagacaaagctaatcttaaatatttgtgggataccgacaaatacataaatatcatgctttaccctttcaagcaagatgagaattctgaaggtgtaattttaggtatatctcatttaccatatacaatcaagcccgattatctagaaggactaaatcaattaaatggtattcccagccacagttcgctcaaatatcctcattgtatttctattaataatacatatataaacagtacaccaagtaatgaatctaaaaaaatatacagttctactgatatagtggcaacaatcgcccatgaattagcccattatctcggattattccatacattctccgaatcggatgatgaaggacttaatacatgtatggacacagactattgcgatgacactccaacctatgatagagaagcatatagcaattggatgcaaagttatatcgaatcaaagaacggcataaagaacatgagtcttagcgaatttaacaaattgtttgaacgaaaagactgcgtcactaatctaacatccactccaaacaacataatggactatgatatatcttgggtaaaccgtttcactcccaatcagcaaaaacgtattcgctatgtgttgatgcatagtcctctcgttcccggtcccaaagtagaaagaacaactactcgtacgctatccggggaacaggaacttccgatgagaatgataaaatagcatttataatagaaaaagaggtgaaccgcttagcgcttcacctctttttctattataaatatcttgtccaacgtcttttgcgcctccgtagaaggaaaccttaaaacaaccttctgcaaagaatttcttgccttttcatatcccgtagcaaataatttcgataatccatcgcggtatcgtgcgtactgcatctttgtaggggaagaaattttcttataatcggtttccaacttctttttctcctgttccgccattagataataataattacccaagaagatgttagcagctaagttgtccgcatccagttgcaatatcgtctcatacattcgcaaagcatccttttcctgcccacgacatacctgcatttctgcacaagattccagataagctacattattgggagccttttgaagtaattctttatagaacagataagctttgtcgtaatttcgtttctttctaaatgcaatagccagctcgttagccaacttcacactaatctcactgctcttatcaatatttgtccaataatacatttccgtacgatctatattcaagctaatcgtttgacggaaatagctcatagcctgcccttgctgcccggcttcaatagcggcagacactttctgcaacatctcatcaaccgactgtgcattcagcatcagcggcaatgaaaacagagacaaaaaaaatatagttaaggttctcataatccgttacattgctatttagttcgtgacacacaaagatacaacaaaaaaataaaaaacgtacctttgttcacgaaaagaacaatcatttagataaaagtgtttctacaagatgataaatataaaattgtactccgaaaacagacgcatattacagattgccataccgtccattatatcgaatatcaccgtccctttactgggattgattgacgtaactatcgtcggtcacctcggttctccggcctatatcggagccattgccgtaggaggaatgttattcaacatcatctactggattttcggtttcctccgtatggggacgagcggcatgacctcgcaggcttacgggcaacatgacttgaatgaaatcacccggttattactccgctccgtcggcgtcggtctatccattgcaatctgtctgttaatactccagtatcctatcctaaaacttgcatttacttttatacagacgactccggaagttgaacaactggcaaccacctatttctatatctgtatctggggagcacctgccatgttagggttgtatggatttgcaggctggtttatcggaatgcaaaattcacgtttcccgatgtatatcgccattacgcaaaatatcgtcaatatcacagccagcttatgccttgtctatctgctggacatgaaagtggcaggagtagctaccggaacccttatcgcccaatatgcagggttcataatggcaatattactatatatccgttattacagcaaactccgcaaacgaattgcctggcgggagatatggcagaaacaagctatgtaccgcttctttcaggtcaaccgggatatattcttccgtacactttgcttggttatcgtcactatgtttttcacttcagccggagccgcacaaggcgagatcgtattagccgtaaacacattgctcatgcaattattcactctcttttcttatatcatggacggttttgcttatgccggtgaagcgttagcaggacgttatataggcgcaagaaaccaaccggctctccgtaacacagtcaatcacctgttctattggggcgtcggtctttctgcagcattcacccttttgtatgcaataggcggaaaaggctttctcgaattactgactaatgacacttcagtaataaacgcttccgacacctacttctattgggcactcgccattccgttggccggtttttccgcttttctgtgggacggagtttttatcggtgccactgccacccgttccatgctttattcaatgctgattgcttctgccagctttttcctcgtctactatgctttccatgactttttaggcaatcatgctttgtggctcgctttcctcatttatctttcattgagaggaattgtacaaacctttatcggaaggcaaatcgtgagaaaagtaatcgtaccgcaatgaggctatccaataaattatctctatatttgcggcaaataataaaataaaaaaggtatggcaaagtataaaagagtcttgctgaaattaagcggagaaagccttatgggcgaaaagcaatatggcattgatgaaaaaagactggcagaatatgctgcacaaatcaaagaaattcatgaacaaggcgtacagatcggcatcgtgattggcggaggaaacattttccgtggtttgagtggagccaataaaggattcgaccgtgtgaaaggcgaccaaatggggatgctcgcaactgttatcaatagtctggcattgagttcggccttggtagctgccggggtgaaagcccgtgtgcttacagcagtccgcatggaaccgatcggcgaattttatagtaagtggaaagcgatcgaacacatggaaaacggtgaaatcgtcatcatgtctgcaggaacgggaaatcctttctttactaccgatacaggatcttcattgagaggaatcgaaatcgaggcagacgtgatgctgaaagggactcgtgtggacggcatttatacagccgacccggagaaagaccctacggcaaccaagttccacgacatcacttacgatgaagtgctgaaacgtggcctgaaagtaatggatctgacggctacttgtatgtgcaaagaaaacaacctgcccattgtcgttttcgacatggatacggtaggcaatctgaaaaaagtaatcagcggagaagaaataggtacaattgtacacaactaattataaaaagaggacgttcccggtaaataagggaattaggatttattatagcgatgagcgatagacagagcatatatactctcctatcgcattatcgctattaatttctataaatttcttcaacaaatccgagaagccggattttatctgccccctgtttatctgtacaagacgagaaactcccaagcattggataggatacaatgaaaaaggcgatttggttctaagggtacaatttcttccgtgcatatagtttccctatttgcctaagaattattcttccggctacacttatttaatcttccgatcgcataaacaggattagttttatgcagccgaaataatagtttttagcacacgaaagattaaattatactatcaacaggctaaacacttgtttatcatcagtgaactgtgtacttttgcacgccattttaaagacttaaagcaatgaacagcaaaaccaaaggttttatttatggagcgattgccgccgcaagttacggtatgaatcctctttttacactcccgctctatgcagccggcatgagcgtcgatactgttttattttatcgttacttttttgctgtcatcgtactagggatactgatgaagatgcagcatcaatctttcgcccttcgtaaagcggatattcttccgctggttattatgggattgttgttttcgttttcttcctcactactgttcatgagctacaactatatggatgcaggaatcgcgtcaacgatcctgttcgtttatccggtaatggtaacggtcattatgggagcgttctttaaagagaagatttcagcaatcaccgtcttttccattctactggctctcgccggcattgccctgctttatcagggagacggaggcaaaccgttgtctaccattggaatcatctttgtcctgctatcatcgctatcttatgccatatatatagtaggtgtcaaccgctcgacactgaaaaacctatcgacaacaaaactcactttttacgctattttgttcggtctgtcggtctacatcgtccgtctgaacttcctgacggatttgcaagtgatacctaccgcgtggctctggggagatgtattggcactggctatcctgcctactgccgtatcactggtttgcacagcattggctatccattacataggttccactccgaccgccatactgggggctctggaacctgtgaccgctttatttttcggtgtccttctgtttcacgaaaagctgacaccccgcttaatggtcggtattttgatgattattacagcagttaccctaatcatcatcggtaagtcactcataaaaaagatgagtatgctgttgcaggtgaacaaaaaataatatacttttgctacttaatcaatcgaatagcaactttaattatcaaaaaatatggtagacgtaaagacttgccttgacaatgcacaagagaaaatggatatggccattatgtatctggaagaagcgttggcacatatccgcgccggaaaagcgagtacccgactgttggacggtatccgcgtagattcttacggaagcatggttcctatcagcaatgtagcagccgtaacgactcctgatgcacgcagcatcactatcaagccgtgggacaaaagtatgttccgtgtaatcgaaaaagccattatcgactctgatctcggcatcatgcccgaaaacaatggtgaaataatccgtatcggtattcccccattgaccgaagaacgtcgtaaacaactggccaaacagtgtaaaggagaaggtgaaactgccaaagtgagcgtacgcaacgcccgccgtgacggtatcgacgcactgaaaaaagctgtaaaagacggattggcagaagatgaacagaagaatgcggaagccaaactgcaaaaaatccacgataagtatatcaagcaaatagatgatatgctggctgaaaaggataaagaaatcatgaccgtttaaaaaacaaaaagcaagtgcacggattagtaatcaaaaacacgggcagttggtaccaggtgaaaaccgacgacggacaatttattgaatgtaagatcaaaggtaatttccggttaaaagggattcgcagtaccaatccgatagccgtgggcgaccgtgttcagattataaccaatcaagagggcactgcttttatcaacgaaatagaagataggaagaactacatcatccgtcgttcttccaatctttctaaacaatcgcatatacttgccgccaacctcgaccaatgtatgttggtggtaactgtcaactatcccgagacttccaccatttttatcgaccgttttcttgcgtccgcagaagcctatcgggttcccgtcaaattagtatttaataaggtagacgtttacaacgaagaagaattgcattatctggacgcacttattaacctgtatacgcatatcggctacccttgtttcaaggtttccgcaaagaacggtgacggactagacgaaatcaaaaaggcgctcgaaggtaagattactcttttctccggacattcgggagtagggaaatcgactcttatcaatgctatactgccgggaattgaaacaaaaaccggcgaaatctccacttatcacaataagggaatgcataccaccactttctccgaaatgttcccggtagacggagacggatatattattgatactccgggcatcaaaggtttcggaacattcgatatggaggaagaagaaattggtcattattttcctgaaatattcaaagtttccgccgagtgcaaatatggcaactgcacgcatcgtcacgaaccgggatgtgctgtgcgcaaagcggtagaggagcatttaatcagcgaatcccgctatacttcttatctgaatatgctggaggataaagaagaaggaaagtaccgggctgcttactagcactctttttttctttcgattgattaactcttttttaccatttctctcattaaacctttcctttcagagagtgtctaagtttgtgaagatattatataacatgctatacatacgatactaaaccatgaataagaaaactaaatggggcatcattatcctcgttggtgccggaattatcggaggaggaatctactcacaattaccaaagaaaaacgacgaactggcagccgccgacaaagtaatgggtggtaatcaaaaaaaaggaaaacaaatcttaaacgtaaatgccaaagtcataaaaccacaattattgacggatgaatttacgactaccggtgtacttctaccagatgaagaagtagatttgtctttcgaaacttccggaaaaatagtcgaaatcaactttgaagaaggtacgcctgtcaagaaaggccagttactagccaaggtaaacgaccgacagttacaggcacaactacaacgactggtttcacaactgaaactggcagaagaccgtgttttccgtcaggacgccctgctgaaacgggatgcagtcagcaaggaagcctacgaacaagttaagacagatttagcaacgctgaatgccgatattgaaatagtgaaagcgaatatcgaattgaccgagctccgtgccccgtttgacgggattatcggactccgacaggtcagtgtcggcacgtacgcctctccgaccactgtcgttgcgaagctgactaaaatcgccccgctgaaagtagagttctccgtaccggaacgttatgccaagcagattaaaaaaggaaccaacctgaatttcagcgttgaaggtaaactagatgccttcggcgcacaagtatatgcagtagaatcggcaatcgacccgaatctgcaccaattcacagcccgcgcactttatccgaatgtaaaccacatcctgctgccgggacgctataccagtgttttattgaaaaaggaagagattcccgatgcaatcgctatccctacggaagctattgtgccggaaatggggaaagataaagtctacctgtataaatcggggaaagccgaaccggtggatattattaccggtatccgtacagcatccgaagtgcaagtgataagaggactacacatgggagatacaatcattacttcaggaacactgcagctccgcaccggactggttgtgaaacttgataacattgattaataccagcgccttatgaatatatccgaattaagtatacgccgcccggtattagccactgtattgacaatcattattctcctgttcggatttatcgggtacaattatctgggtgtccgcgaatatccgtcagtagataatccgattatctctgttagttgctcatatccgggagctaatgccgatgttatcgaaaatcagataaccgaaccattggaacagaatatcaatggtatccccggtatccgttctttatccagtgtcagccagcaaggacaaagtcgtattaccgtagagtttgaattgtctgtcgacctggaaaccgccgcaaacgacgttcgtgataaagtttcacgtgcacaacgttatttacctcgcgactgtgaccctcctaccgtatcaaaagcggatgcggacgccatgcctatcttaatggttgctcttcaaagtgacaaacgttcgctgctggagttgagtgaaatcgcagatttgacagtcaaagaacagttgcaaacaatttccgatgtaagtagtgtgtctatctggggagagaaacgttactccatgcgtctctggctcgaccctgtgaaaatggcaggttacggaattactcctatcgatgtaaaaaatgcagttgacaatgaaaacgtagaacttccttccggtagtatcgaaggaaatactaccgagttgacgatccgtacattaggactgatgcacacggcagatgaattcaatgacctgattatcaaggaggagaacaaccgaattgtacgtttcagtgacatcggacgtgccgagttggggccagccgacatcaagagctacatgaagatgaacggcgtacccatggtcggcgtggtagtaattccacagccgggtgcaaaccatattgaaatcgccgacgctgtataccagcgtatggaacaaatgaaaaaagacttgccggaagacgtgcactataattatgggtttgataacaccaaatttattcgtgcgtctatcaatgaggttaagtctactgtatatgaggcttttgtactcgttatcatcatcatcttccttttcctgcgcgactggcgtgtgacactggtaccatgtatcgtgattcccgtttcccttatcggagcattcttcgttatgtatctggcgggattctctattaatgtactttccatgcttgccattgtgttgtccgtgggactggtggtggacgatgcgattgttatgacggagaatatctacatccgcattgaaaagggaatgagcccgaaagaggcagggatcgaaggagcgaaagagattttctttgctgttatttcaacgacgatcacactggttgccgtattcttcccgattgtcttcatggacggtatgacgggacggttattccgagagttcagtatcgtaatttcgggttcggttatcatttcttcgttcgcggcactgactttcactccgatgttggcaaccaaactactgatcaaacgggaaaagcaaagctggttctatgcaaagaccgaaccgttctttgaaggcatgaaccggctatacagccgttcgctagctgctttcttgaacaaacgttggattgcccttcctttcacttttattactatttgcctgattggagttctatggaatgctattcctgcggaaatggctcctcttgaagaccgttctcaaatcagtatcaacacacgaggtgcagagggtgtcacttatgaatatattcgggattatacggaagatatcaaccagcttgtcgattccattcttcctgacgcagaatctgttactgcccgtgtatccagtggtagcggaaacgtgcgtatcacgctgaaagacatgaaagatcgtaactacacgcaaatggaagttgccgaaaagatttcgaaagaaatacggagcaagacaatggcacgttcgtttgtgcaacagcagtcttctttcggaggacgtcgtggaagtatgcctgtccagtatgtgcttcaagctactaatctggagaagctggaagaagtactgcccaagtttatggctaaagtatatgagaatccggtctttcagatggcagacgtagacttgaagttcagtaagccggaagcccgtattcagattaaccgtgacaagtccagtatcatgggagttagtaccaagaatattgctcaaacattgcaatacggattgagtggccagcgtatgggatatttctatatgaacggaaagcaatacgagattctcggcgagatcaatcgtcagcagaggaataagccggccgatttgaaagccatttatgttcgcagcagcaatggggatatgattcagttggataacttgattgagttggaaagtggtatcgctcctccaaagttataccggtataaccgatttgtatcagctactatttccgcaggattggcagacggaaaaacgatcggacaaggactggacgaaatggataagattgccaaggaaacattggacgacacgttccgaacagctttggcgggtgactccaaagaatatcgtgagagttcttccagtctgatgtttgcctttgtcttggctattcttctgatttacctgattctggctgcgcaattcgagagttttaaagatccattgattatcatgttgacagtaccgttggctattgccggagcattggtattcatgtatttcggagatataacaatgaatattttcagtcagattggtattattatgctgattggtctagtggcaaagaacggtatcctgattgtggaatttgccaatcagaaacaggaggccggagaggataaaatgagtgctatcaaagatgccgccctgcaacgtctccgcccgattcttatgacaagcgcttctacagttctgggacttatcccgttggcattcgccaccggagaaggctgtaatcagcgtattgccatgggtacggcagtagtaggtggtatggtcgtttctaccctacttaccatgtatatcgtaccggctatttacagttatatctcgaccaaccgaatcaaaaaactaaccgaatgaaacagaaaggaatttgcatgaaacgtatcatatatatagttaccgcatgtgccttcttgtcagtttctactgcgaaggcgcaacaagtcctcacactgaaagagtgtttggaggaaggactgcaaaacaattactcgttgcgcatcgtccataacgaggaacaaatcagcaagaacaatgcaacgttagggaatgcaggatacttccctacattggatttctctgccggatataccggaaacctggataatattgaaagtaaggcccgtgccaccggagagattacaaaaaacaatggggtctatgaccagaccgtcaacgtcgggcttaacctcaactggactattttcgacggattcaatatcagtacaacgtacaaacagttgaaggaattggaacgtcagggagaaactaacacccgtatcgccattgaggatttcattgcggacctgacctcggaatattacaactttatccaacagaagatccgtctgaaaaactttcattatgcaatgtcgctctccaaagaacgcctgcgtatagcagaagcgagtcatcttgtcggaaagttctcaggattggattatcaacaggcgaaagtagacttcaatgcagacagtgctcaatatatcaaacaacaggaattgctgcactcatcgcgtatccagttaaatgagctaatggctaacaagaatgttaatcaggctattataatcaaagactccacgatcgacgtacatggggatttgaaatttgaggagttatggaatggcacactggcaacgaacgcttctttactgaaagcagatcagaatacggtacttgcgcaattggattataaaaaggtaaattcacgtaactatccgtaccttaaactgaatacgggatatggatatacctttaataagtacgatattaatgcaaccagccggaggggaaacttgggcttcaatgccggagtaactgtcggatttaatatattcgacggcaaccgccgccgtgaaaagcggaatgcaacccttgccttcaagaaccgccgtctggaacgtcaggaattggagcttgcccttcgctccgaccttagtaatttatggcaggcttatcgcaacaaccttcaattactgaatctggaacgtcagaacctcgtaactgccaaagataatcacgatattgccatggatcgttatatacagggagacctttccggttttgaggtacgtgaagcacaaaagagtttgctggatgcagaagaacgcatcctctccgcagaatataacaccaaactttgcgagatctctttgctgcaaatcagcggaaagattacaaaatacctggaagaatagaaaaactacgtgaataataaacgatgaacggtgaacacaactggcagcatattgcacagtttgttcaccgtttatcgcgtttatagtatatcgttttacagattatcccatgatgtatttagcaggtttaccgatacgattcaccaagtttacaatcaaccaggacaccagaaaagcgactatcgcagctatcggtatctgtaaaggaataggtatattgagtgttcttaccaataccactgacggaccggtaaagaagtaatgtatcatatagacaccgaaaccacatacggtcaggttagccaatgccttccgtactctttccgaacggacattgactttcttagccaacataaatacaggaattgtcatcatcaccacattgagagaacaataggtaaaaaagagttccaacatttcgtccgtacaatccggcaaagctgtcatgtaacggaaaccaaagaacgtcacgacataccccaccacaaacatcggaataccgattgccaatgttttcttcaggctccaatcgagatctttcagataatgtcctaacaataagtatccgttgaaaccggcaaatgcatataacattccaaaagaattccaagagcaagagccccataagtaagaggaaacaaactgataataataaggtagcaacaatgtcactccccaagccagcaggaacattaacttagcccgttgcgaagctttttccacccatgccgaaaaaacaggcaggtaaagatagagtccgataagcagatagatataccacatgtgcactgccaaaagggagaagttaaaaggaattgtcagaatgtattgtatagctactgaaagggattgctgcatcacttcttcaccggaataaggaaagaaatcaaggataatctttgggtctaaccccaataagccggtaatccaagggaaaagattatagataatagaccaaattaagaacggataaaaaacacggggaatacgttttttataaaaagtagaagcgtcaccccggacaggcaagagcaatgcgcctgtaatcattacaaacagaggcacacacggacgaagtacagcaccgtaaatggctccccacaattttatttccccaatattgggagctgtgcccggatagaagttgaatgggtcggtacaatggcagcaaacaactgtaaacatggcaataaggcgtactacatccaaccagacgatatgttggttcttcggattgtttaattcgattgtcggtggtttcataatagttagtgattagaaaaagagagttagtaaaaaagggatgcctatacgaatttgacaggtatcccttaaataaatcatttattgaatcagaactgcaaacaaattatttagtgcaattccacggttttaactgtttgaagaagtcattgcccttatcatctaccagaatgaatgccgggaaatcttctacttcaatcttccagatagcttccatgcccagttccggatattccacacattcgatgctcttgatattattttgagcaaggatagctgccggaccaccgatagagcccagatagaaaccaccatatttctgacaagcatccgtcacttgctggctacggttacctttcgccagcataaccatgctgccaccgtgactctggaacagttccacatacgaatccatacgtcctgcagtagtcgggcccattgaaccacaagccatgccttccggagtttttgccggacctgcatagtagataggatgatccttaatgtattgaggcaggtcctcgccacggtccaaacgttctttcagcttggcgtgagcaatatcacgacctacgataatcgtaccattcaatgacaaacgggtagataccggatatttagtcaactctttcagtatttcggacatcggacggttcaggtcaatcttcacaacatcgccttcgcctgccttacgtaattctgccgggataagttcgcccggatttgaatccagtttctcaatccagataccttctttattgattttacatttgatgttacggtcggcagagcaagatactcccaaacctaccgggcaagaagcaccatggcggggcaaacgaatgatacgtacgtcatgagccagatatttaccaccgaattgagcgccaaggccaatcttgtgagcttctgccaatacttctttctccagttcgacatcacggaatgcacgaccatattcgtttcctgttgtcggcaggttatcatagaaatgagtagaagccagcttcactgtcagcaaattcttttcggcagaagtaccgccgataacgaaagcgatatggtaaggagggcaagcagcagttcccaatgttttcatcttttcaaccaggaacggaaccaatgtacccggattcagaattgcctttgtttcctgatacaaatatgttttgttggcagaaccacctccttttgttacacaaagaaattcatactccataccttcagtagcctcaatgtcaatctgtgcaggaaggttacattttgtatttacctcatcatacatattcagaggtgcattctgagagtaacgcagattttcttcagtatatgttttgtaaacacccagcgaaagagcctcttcgtcagaataccctgtccatacctgctgtcctttttcaccgtgaataatagcagtaccggtatcctggcagaatggaagtatacctttcgatgccacttctgcattacgcaggaaagtcagtgccacgtacttgtcattctcgctggcttccggatcgttcaagatttttgctacctgttcgttgtgcgaacgacgaagcataaatgatacatcacggaaagcagcattggccattgcagtcagaccttctttctcaattttcaggatagggtttccttcaaactcacttaccgacacatagtctttcgtaagcagataatactcagttgtatcttttcccttttcaaacatgggttgatacttaaacggaggtgttgccataagtttcttattttattacgtaatgttagttagtgaggcaaaggtaataattaagaatgaagaatgagaaaggaaagaagaagaattaagaatgaataacggagaatgacgaggtacaaatgaagacggtgaacgaattgtactttattgtacaatgtccaccgctcatcgattcatagtttggttcacttattgtatatgttcgattcgtttaatcagttcatttcctaaagcagttttgtcctcgatgtgtttcaaaactgcagtcacgaatgtattgctttcaaagtcaccacgtacttgttcgaaatcctgtttcatatcatcgcgagaaccatcaacaccgaatccggtcattgaagaaagcgagaactctttctttgcgtcttcataaaccattttatccaaccctaccacagctttctgccatgctttcacgatagtaaccacgtcctgagcagttaccgtttccggattcaagccataaaattcctgaatcttattatatgcccaggtccattcatacgtgtaatagttttcatgcatttccgcaaaactggcattaatagatttcaggcggttaatagagccgttttcgataccgtccaacaatcggtctatttcactcttgggagcaatcagtccggagatgtccacccattcgccgacaccgatttccgtatccggtttcaggtgctggcggatttcgtcattactttggaaattaatgccttccaaccgttttatgatagagttccccaagaatttgttgatggcaatttcatagaaacgaatcccgttattcaaagaagaattcttgatctttgcactctggtaagagtagatttcagaggtttcgccggatacccgtttcaattccttcaaaatagaacgtcccttgaacatcttttgaatggtatatggactcaaaaggttataattgatataatcaagccggttcggatctttccgtttgtcacgtttcggccatttctgggcgtcacggattgtcccgacacttctcagattcactccgggaaccagataagtggtattccgttgttctatcaaataggagaaaggaagattggaagtgtcggcatggtttacatgacgtcccattaccaaagaaaaagctccgacacgtgccggccataagatatatgaatcagaagtcgtttttgcccctctttccatggtcccctgatgaatcggtcccaacttatacatatgattactctgattagatcccgaacctgcattcatgaatgagaacattccggcaatcaacaaagtcgatttatggtgagtcaccgtgaaagggcctgcgaagatagcgcacgcttctccattttctccctggcagttgctgaagaataacgagtcggaagcagaataattgtgtcccagtttacaagcttgtccgacaaagcaacggcttagcatcgttccgtcgtccacgtctgaaccggaagagataataaagtcgtcgcagatcaccccgtgaccgatatgcacaggtgccgtcacattactattgatactgccattggtcagccgacaggttccacagatgtggcaataatcaccaatcctgacatttctgattgaacctgtattaagaatcatcacatgatcaccaatactgccgacagtagaagcgtgcttattggaatagtaatccgtaatcgctttcatgcgattgattagttcaggacgatgacggtacaacgccaatatgtaggcctgatgcgctgacaacttgtcgttaatgagtacttcacgccctcctgtttcattaagaactgtcgcctctaccccattaccgaaagtagtaagcctgtccaccagaatgatatccacattctcaatgaaggtatcattaccgatctcataattagcaatgtagttctgaatgttttcaatgcagcagttatcccctactgtcacattgtgcaaagttacatgacgcaatccggaatgtttcctgatgcctcccggcaatgtaaattcagcatcaaatacacccagtttcacttctcccgaaaaacgggtgtgatgaacgtactcacaattaaacccctctgcaactgatacatttccccaatcatcagccagacacgactggctctttaactgaagcacttcatcttcagttagtctacgataatctttcatattaataaatataagtaatgtgccgcttcccccaatcagcaaagcagcacattgattaattattcctcctcttcgtagatctgataaagaaaatcgttataggggtatttctgaacgtgtaattctttcactcgttgataaactacgcttttcagttcgtccatattgattctttcgcgggcggaaataaagagacagttgtcttccatttttgccatccacgtcttcatcagttcttcgagtgttaagttttctttcgttcggggggtaaggtcatccggcgctttctccacataggtgtaagcgtctattttattgaatacaagtatcatgggtttgccaccgccgccaatttcggcaagtgtcttgtttaccacttcgatctgttcttcaaatccggggtgagaaatatcgactacatgcacaagcaaatccgcttcacgcacctcgtcgagcgtcgacttgaacgaatcgaccaaatcagtcggcaatttacggataaatcctaccgtatcggataacaagaacggcaggttatcgataatcactttacgcacagtggtatccagagtagcaaatagtttgttctcggcaaacacttcgctcttcgagagaaggttcatcatggttgattttccgacattagtgtaacctactaatgcaacgcgtatcatgcgtccacgatttttgcgctgggtagctttctgcttgtcaatctctgccaaacgttctttcagtaacgacatacggttcaagatgatacggcggtccatttcgagttgcgtttctcccggtccgcgaagccccacggaacctttaccgccaccggctccggaaccgcctccctggcgttccaagtgagtccagagtcgttgcaggcgtggcaacatatatttatactgggcaagttccacctgcgtctttgcattagcagtctgagcacgcatcgcgaatatatcgagaatcagtgatgtacggtcaagtattttaattttcagctcagcttcaatattacgtatctgtttcgcagaaagttcatcatcaaagataaccattcccacttcacgttcttcttcctcctcgttccggatatattgtttaatctcctccaattttcctttaccgacataggtcaccgagttagctgtcggcaacttctgcgtaaatcgtttcactacttccgccccagccgtctcggcaaggaacgccaattcatccagatactcgttcgttttacgctcatcctgcgtctgagtgatgagtcccacaagcactgctatttctactttggcttcggatattacaaattctttcattctttacttttttctttcctatataacacggggacaaagataatgatttcaatgagataataaaagagagtatgcttacgtttttttaaaacgcgaacatactctctatttattcttgtcaagaagaaatgatctatttcttcatgttaatcgtctttcaaatattgattagattcgaatcactcatcctcaagtatcaatttaaagtcatccggcactgtaagcacagattctttttgtccaatcagaccatccccgtaataatagacattgagagtcatcttatggcttgtcggatcatatttagaatccacatcatctacccctaaatagtccaatgagctaaatcctaggatatctgatccttcttctgtcaagtacccggtattataactatcgaaagcgactccattgtttttcggattaatcgtgaagaacaaatattcatccggttcaccaacttcttctcctgactctgccaaagcttgcgagaacggatcaacaatgcgataacgattctcgccatctacacgttgtacttttacattatattctttaccagcattatattcatcaaatacccagtctttgaaagcaaatgttcccgaaacatccacccatttcaaacattgaacagtgaaactagcatgtccgtttcctttatatggattaacggcagcagcttccaatgagatttgaaacgaatactcctcttttagctgtgcattttcaaaagttataaccagatcagccgttgcctgtccggctgcaaaactaacactctgagggatgttgaaaatattttccgtattagcctgtacctcaattgcaacagttgcagccgcctctgtcttatcccggctaattgtcaacgtcagttctttaggatcagtatcttccaactcttcatatccaatattatctcccacaaaagaagcaccaatacaattgggatcaactgccggagaaggagtacgtccatcatcatcggagcaagcagccatgcttagcaatgctattcctccaattaataaagctatatattttgttacttttttcattgtagtattcattttaatcagttgcaccatcttttagattcggattctgccctgctacgggaaggttacctccggtattattcacgataccggcattgttattgctttctttctgcgggatacgcaacagcaaccaagggtcatcagcagcaatattgaaacagaaagcatccggccagtttcccttgtcacttccctggaagcgaacaacaggtttacccaaacgcataatatctgccatagagaagccttcaccccataattcaatacgacgttgcaaccaaacatcatcaacagttacagaacttttgttccaactcgcatcacgctcatccatcaataccttaagctctttagcagcattaccttcgtcattctgttgtgccaaagcttccgctttgataagaatcatctcctcggcacgcatgatacaccagtcattgtcattattggagcttcctataccacttttcattccgaacttcacattggtatatttgataaatttcatttttacatcttctatttccaatgtcgaaatatcatttccaattgcagagccccagctaagtccagataatgcgtctgatttcaggttttcatcgacccaccattgtttgcggacatctgatgttgagattttcttataaagcaaggagtttatagtcttatacatggctactcccgccgtgtaagcataactggagaatgaccctaattgtcctgccggagttgcatacgcattcttattcaccataggtacagaaacgttaattccccacatccagttatgatcggatatatcataaaaagcaggtttggacacttcttccttagtataaggagtatagccttccattgccttatcagcatcattgtatgcttcttgccacattcccatatacaagtgagcacgtgcacgtaacccataagcaacctgttggtcgatacgagtcttatctccctgacggttatatccttccaacaaatcaatagcactattcaagtcacttataatttgttcgtagaccttacctaccgtagcacgaggattattgacaaaattagtcgtttcttccgttatcaacggcacacatggaaggtctttactggtagcatagcggaactgataataaggtgccagacataaataatcaaacgcacgaaccgccttagcttgtcctaaataatacttttcagtctcactcgccgtcgccggatcaatagaaagaataatatcattagccgcttttatctgattataaaagatagcataacgtgcaaagggattggcatacgtagcataacggtcactatattcactgctgacagaaaaccagttataaccattattggcacagatcatatccgggccattcaaatcctgagaaagacaaactgtcggataaccaccgtcatcatctctggtatcagaaggaaatgcagcacacactgtccccatgctgctatacatacctgcaattttagcctccacacgggaagggatgacagatgtagcatcatctatctgttcacctgtaattcggtagccctcactctcaatatcattgatgtcagagcaggaagcaaacgataatgctcccaatataaaaagtgcaaacttatttattcgtttcatagttctttcttttttaattaaaacgtaagagaaattcctcctgtgatagtacgcatcgcagaatatgaactggtagtattggcaccactttcagcagtcgagcttcccagacctaatcccaaacgcgggtcaagacctttgcgtgccgataaaagagctacattgtcagccgtcaaataaactctacaatgagatagtcccagtttgctggtcaaacgtttcggtattgtatatcccaatgtaatattgttaaggctgagataatccgagctaacaaggaaacggctggaatcctgttggtagcttgcatcacttgcacttaaacgaggtacgtcagtataacgattgtccggtgtccacgctttacggatgtccgtagaccagtttgtaccttgcataccactatttccattgtgcatatatgcctgataagccccgtcgtaatatttgccgcccaactgataagaaagctgcaatgagaaatcaaaaccgtagaatcgcactgaagtccccaaaccaccatatacttttggcaacgtagtaccctgatccgcttgttgggcttcttcatagttagaagtctttgtataatcaccattatccggatccacataatacaatgcctttcccgtatccggatctactccggcgtatgttttcaaataagactggtaaagagatcctcctacccggtaaatataataagaacctttttgaccgccatttttctccaaatccggatccaatgcagtaattttattggtatagtgcgtcaggttgaagttcatagcccattcataatcctttccgcgaaggataatgccgttcaaatccaattcaacacccttattcataatatcgcccacgttggtcggctcataacctgtactgataccggatgatacagggatcggtttgttatacaacaaatcgacagtttttctgctgaaatattcaatagtaccattcaaacggttgttgaataattcaaagtcagtaccgatattgaaagcataagacgtttcccaagtcagatctttcgttcctttatatttgagaatcagtgaatattgcccgttagcgtagttcacatcatactggtcttgataagcataccagttgtcacgctgtacaccgtttacagtaatcagcagtctgtcattaccctgcacaccccaactagctttcagtttcaacatattcacccatttcacgttttccatgaacttttcgtggttaatcagccaagctccacctacacttccgaagttaccccaacggtgatctttatggaaacgtgaagaagcgtcacgacgataagaagcactgaggaagtattttccgtcatagttatattgcaaacggctcaaaataccttcggtcatataattgtccgtatatgatttcgcattcttcttgtctatacctccggcattattcaactcaccaatatatgggttgtacagattggtgttttctccgtagagtacttgattcttataacggtattgttcataaccgaccaataaatctgcattatgcttatcggcaaacgtacgtgcataggttgccagatactggttattcactcccatcattctggtatgctgtacaaaaacagaaccatcatctgccgatgcagatccgaaagcactgctcaactggttcaaacggctgttctgtacattcgcagaaatattagcagtcagcgtcaaaccttcaatcggagtgatgttagcataccattttccacttaacaaatcggtatattcatgctgacggttcagttcgatgtctctagccgcatttccagttaccgaaggacgagaaaagccgctgttgttacccgagtcatagattttataccctgtgttgggattgatagcaatacttccgtcagcattacgtacatataaaggatagatcggtgcaattgtattggatacataaaataagttagcagaacttccccaagaatcaccatcctgatagtcaggagcttgtgaatccgaataagtgtatgcaatgttggttcctacttttaaccattctttagcttgataatcaacttttgcacgaccggtataacgtttgtaagcagaattttgaataataccggaatcattcaggtaaccgacacttgcatagtaattcaatttgtcagaacggcctgagatattaacattgtattcctgacggaaatttgaactgaatacttcgtcataccaatcgtcaggagtataataatatttaccatcagaataccctaacttagcattcggattaagcttgaaattgttaccaatcaatttttcaccatcaggcacggtataaacaaggtatcccaatccaccattttttgcgtccaacaaagttttatctgcataattataagcttcggccttagaggaaccggtatagatcttggaattgtacaaagtcttgtactgcgtttcgtaatattctgccgttccaattacatcatattgaggaaccatgcgcgaattggacccccatttggcatcaaatgtgacctttgctttttctgttttagcagatttagttgtaatcaagataactccattcgctccgcgtgctccataaatagagttagcagccgcatccttcaatacagaaagggattctatatcttgagggttaatggaagacatatcaccatcataaggtactccgtctactacatacaacggagcattgcttgaactcatagaaccgataccacggatacgaactgtcgcagacgctcccggagctccgttagcatttactgtctgaataccggccacctgtccggagagggcattggtgatattcgacacaattctctcttccaatttatcagctttaatagttgaagcagaaccggtaaatgctgatttcttagcagtaccataagcaacaactataatctcatctaattgtttagcatccggcttcaatgtgatttttaaatggggtttaattgccacttcttgcgcctgcattccaatatacgaaatctgcaaagtctttgcagaacttggtcgttcgatattgctcttattatcaatagattataactatttgcaaaacataagtatcttgtcattcttcttaataaaaaacaacctatatctttaatttatagcttattatttatagtagcaatgatataaaaacagaaattgtgctactaaatatctacttgaaaaagagataagtatttagtaaataatcgtttagactttgaaaagaacccactttgactttgttattttgttccacaacaatttccattgaatgcaaatactagaattacttaattgagaatattcctcagatgttaataaaaataggttttatttattctatgtggtatcttattttataaattaaaatgatttacttctttccgtacggttgtggattatttttaagttagtaactatctacttctcgtacttaataaatcaatctttgttattgcataattttattcgtctgacagatgttgttttttcgtctgacaactgttagacgaaagagaaacaactgtcagacgaaagtttaacagttgttagacgaataaagctatgcataacgagtactaactaatagtatccggagagcttaatcctggaagatttaggattagtttcctttatgtttgccaccggcttttgagtagattgctttttcaagatcccgtacaagagttatatccataatattcgcatatacctgagtcgtttttacacttttatgtcctaacaacttttgtacagtagtgatattagcaccactatatattaataaggtagcatttgtatggcgggcggtatgaaatgatatacgtttatcaatttctgccagtttccctaatatactcagttccttattaatattcgaattatctttcaatttgaaaaaacgattaagatcatccttatagcgctgcaatatatgaatgcctttcccttcaaacaatagatataatggtagacgtacctcaataccagttttgactgatttgtaaataagccacgtttcctgttgaaactcaacaatatttgcagatgtcaaattggtaaagtcggagtatcgtaatccggcgtaacagcaaaataaaaaggaatcttttgtcttttgcaatttagcatattttcctcctagctgtaaatcctccaatttatgcaattcttccggtgatagatgactatgtctgccttctacactttttattttatattttctgaatgcatatttctgcacgtccatataatccttatttatagcgacgttaacataacgtttcaaatgtttcatatgtttggcaatcgtattcaggtgatatcccttggattgcagataattgtcaaatgaagacacaaattcaaatgtcaggtccgtgaactgtacttccttcttaaattcttggagtagctccagagtagacaggtgattctgtctggtgctttctttcaaagaagaattagcgacttcttctctgaagaaagttaagaacgatctaccgttgcttacaggtttatcgatggaatcctttaataactccaaagaaatactcttcccctgttgccataatccaagttctatttgttcaatagccgcaatgtgctcgtataacatacgattcaatacgtctgcattaggatgtccctttaccattctacgtttcgtatcccactgttcaggtttaaggtatatcttagtagagaaatatatttttcttctatttaaataagcttctacctgtactaatgccattccctttttattcaatcctcaaatccgcaactacgcgcctaatatgatacagaagcgaaaagaatctgcatcgttagtaaaaagggggcacagtgcatcgaatgtcaccataaagacatataaatgccccttaccccaccatgcgacttgaggcaatacgcaaaatcacgactataagttgtcggtgttatccaaagtcattctggaacacattggcataagcattgttgcatgaatagatattcagcacatacttccttgatgtcctgacccatttggctggcacagagatgaacttaaagacaaacgtcttgatgcggcttgttgctttgagtccgaacctcttcacgtcaagcctcgccatgatgaatttatagaagttgcgtatgagtgccataagcagaagaaacaccgtgttttctcccataaaggattttggaagcctgttccagccgaatccgttattcatatcatcgaagatgcgttccttccctccacggaggttatagaattcgacaatctctttctcggaagactcgtagtcatttgtaaggatgcagcggtaggtgtattctccttcccacaggtcgagttcgccgtctatccgcttctgtctttgaatcacaagacggtatgccttccctttccatttctcgatgagaatggaggccagctcaaactcaatgccgcccaattccactttcttccaacctctgagggcaaagatgtcattgtagagcgaactgcatcggttagcacggatatagaaggtcttgcagtgtttagcaatctcttccactatctcttcagaacacgagccgcaatcagctctgaaacggttgataataagcttgttttgttcaaacctttcaaagaacctcttcagcgtgtccttctggtggaaacggacatttgtgttgccgtcgctgttctcaatgccgacaatcaagttgccaataaccgccacgccagggcgataaccaaggaacttcttgtatgtaggcttcgcatcaaacttctcagcctctatgaactggtggtcgaagtcaacgtcatacccctcgccctctttcagctgccctgtggacaataggcaattgaggagcagtgtattcagcttgtctgccgtgttgaagtcgtaggtcttgccagtgtcggatgtgtaggaaatgttatcctgggtcagttcctttatggctctaagaatcgtgtcggcactgcatgtgcgaagtgtcggatgaagcgaaaggtggtacatcagatgagtggtgacatcctcgatgcatgagccgccacaaaaataaacgctcataagcgaacggatgatttcgctgtattgataaccatacagcctgcatctcataccgagggttgagtcgattacagatgagagtctggagtcaaattgctccattattgaaaatattcctccaaaaggagtgagtttctcggatttaattgctacctttgccatgtctgtcgggtttgatacatattttgatttgcaacactaagataggtgaaaaatctgacatggcaaattcctgagcaactttttgttgctcaggtacttaaaaagttatatttgtaatagtgttgcggaattaaggtcaatcttttttttctgttaaacacaaggttgtaactaatcttttccatacttcagttttttaattaataatagaacaaattagacgtagttctgtgctacgccagggttgaatatgcattaatatctctaaaaaaataaatcctcaaaaatgaagtattcacaaaactttaaattaaatgccactttttattgatgtttttttcaaaataagcaaaaaggtttgttaatagaggtgttttgtgactaaaaatgagtatgtgaaatattaaaatgagcattttgcttttgcaaagtgtcgcttctgagttttgaaatcaaaacttttgcagccaatatctatgcttattagcataaatattagcaattgaataacagaatgccatatttgcaacctttttttattaaatgaattgttagtttcatatttattaatatatttgcaaattgttagagtaaagaaacaattaatgtaaagttaaactttaagagagaatttatgaaaagaaaattgatgctgttattggcatgcctttttgtgggcataagtctggtaactgcccaaactcagaagatcacaggtgttgtgatttctgaagaagacgggcagccagttgttggcgcctctgtgttagtaaaaggtactactcaaggtacaatcacagatgtggatggtaattttaatttggcaaatgtaccaagttctgcaaagactttgcagatttcgtatattggaatgcagactcaggaagtcattattaaaccgaccttaaaagtcatactgaaagctgatgcacaaaaattagatgagatagttgtgacagcaatgggtatctcacgtgagaaaaaagcattaggatatgctgtacaagatgtaaaatcagatgtactgacacgggcggccaatacggatttagcaggtgcattacaaggaaaagtatcaggtattgacatcactccttcatcgggtatgccgggagcctcttctaaaataaccattcgcggttcccgttctttcacaggagataatacccctttatatgtaattgacggtatgccaattgcttctactgccgatgttagtacatctcttactgacggagcatatggcacagactatgctaatcgtgcagtcgatattgatcctaacgacatcgaaagtattaatatactgaaaggacaggctgcttctgcattatatggaatgagggcctcgaacggtgttattgttatcactactaaaagtggtaaaggagcaaataaagggaaaccaaacatcacttttagcaccaacctttcattcgataagatctcaaccctgccagagttacaacaagaatacgcacaaggctctaaaggagtatttgaccccttatcaccttttgcatggggtcctagaatctcagaattacctaatgatcctaactatggtggaaatactaataatagttacaccaataagtatggtaaacaaccagacaggtattacgttcctcagcttgcagcagccggtatggacccttgggctactccaaaagcatataacaacatgaaagacttcttcgaaactggtgtatcgtggagcaacaatgtgaatgtagcccaaaaatttgataaagggaactactctttctctatgggaaataccactaccaatggtattgttccctcaacaggtatggatagatacaatgtaaaattatcagcagaagcacaactgcaccccaactggactaccggatttaatgggaattttgtgacttcaaagatcacaaaacaatctactgccaacacaagtgtagttgctactgtttacaatgctcctgttagttataatatggcaggcattccttcccatatagaaggtgacctatatactcaaaatacctatcgtagtgattggattgacgatgcttactgggctgtcgataataatcaattttcagaacgttcacaacgcttctttggaaatgcctttgtgaaatactccactaaattcgggaccgacaaccataaactggatattaagtatcaaataggtgacgatgcttatacaactaactattctgaaatttatggatatggaagcacttgggccgctacaggtgaagattcggaatatcactatactgttaatgagctaaactcattactgactgcctcttacacatggaatattaatgatgaatgggcattagacgctttaatcggtaatgaatttgttgataaaaagacaaaatacgaatatgcgtatagcatgaatttcaactttccgggctggaatcacttaaataatgcttctgtattttccaatgaaagtcaatacaataaaaaacgaaccgtaggtaattttgcaaatgtatcagttgcatggaaaaatatgctctacttaagtggaagtatacgtaatgacatcgtttcaagtatgcctcgtaacaatcgttctttcacttatccatcagtctcattaggattcatttttacagaattggcaccgttaaagaacaatatattaactttcggtaaaatacgtgcctcctacgcagaagtaggtatggcaggagattatactcaaagctattactacactcccgcttatggtggcggtttctatatggggaatcctattgtatacccaatagccggagcaatggcttatgtaccatactataaagtatatgatcccaacttaaagccacagaatacaaaatcatacgagataggagctgatcttactttcttcaacggattggtcacattgaattatacttactcccgtcagaatgtaaaggatcagatatttgaagttcctttagccggttcaaccggagcctcaagtatgataatgaacggaggtaagatacatactaatactcatgaagtgaccttgggcatttctccggtagatacaaagaactttaaacttgattttgccttcaacttctccaaaatcgacaattatgttgatgaactggctccaggagtagaaagcattatgttaggaggttttgttactccacaagtacgtgccggaattggtgacaaattccctgtaatctatggaaaaagctatatgcgcaataatgaaggtaagatagttgtagatcaaaacgggctccccatgcaaggagaagatgcggtcatcggaactgtatctcccgatttccgcctggggttcaatactaatattgaattatacaagttccgcatttcagctgtatttgattggaaacaaggcggtcaaatgtattccggtaccgctggcgagatgaactattacggtgtgagtaaattatctggagatatgcgtaaaactgattttattgtagaaaactcagttaaagaaacgggtaaagataccaatggaaatccgatttatgctcctaatgacataaaggtatctgatgctcaatcctatttcacaagaagaaggtctattgacgagtcttatatttatgacaactcttatattaagttacgtgaattatccataagctatccggtcctctccaaaaaatggctaaacgtaaacgtaaatgtctttgcacgtaacatattagtttggtcagaatttaaaggattcgacccagaggcttcacaaggcaatgacaatatgggaggcgcattcgaacgtttctctttacccggaacggccagttatggcttcggatttaatgtaaaattctaattagctaaaaagaaagatgaaaacatatactataattaaaggattttttgccgttggcgttttatcagttgtcctttccggatgttcggaagatgcaatggatagaataaataaagatcatggacacacacaaagcgtggctggaagatttatcctaactgatgtaataacctctaccgcgttttcaaatgcaggaggagacttaaatacttatctatcttcatatattgaatatgaagtaggtgttgacaatcaattgtattatgcagaaaccagagaaagtgaaccgacatcatcttccactttcaataatacatggaacaacctgtactcaacattaaaatccgcccgtatcataattaaccaatgtagtgatggagggatagattacggcaattatacaaccaaaggcatggccgaagtattagcagcctacaactgtgcattaatagcagatatgtttggcgatgctccgtgcagccaagctgccttagttgacgaaaatggttcccccgtttatctaaatcccaaaatggataaacaagaggatatttataaacaagcaatgcaatatctggatgacgctattgcagacttacaacaagaggatttaatagatccatccagtcaagatttactttaccaaggagatgcagaaaaatggctcaaatttgcatatgccctgaaagcacgctatacgatgcacctacttcaaaggtcaactaataaagacgctgatatggagaaagtgttggagtatgtaagcaagtcttttaaaaacacagaagaacaggcagcattcagtgtatatgatgtcaataacataaatccactttatggtttcttcaaagcacgtgcagcattgggagcaagcgaaagcatgagaagcaaactagctgaatataatgacccacgtctgtccagggcattcattacaaaactagacaaagagaaagaaggaaaagcacaagctccggggactcctgatactgatgtatatgcacctagcggaacaccggaacaaggaaccagcaaatatggtacatctctgtttatgtattcagcaacagcccctactcttttaatgagcttccatgagttaaagttcttagaagcagaagctttatgccgattgggacgtgatgcaaaaagcgccttgaaagaggctgtggtagccggattgctaaatgcagagaacagttttagtatttccagaaaagaattgggaaacacattactaaacccagctagcgctatcacggaagaagaagcgaatagctattttgacaacactgtagaagctacatatacgaatgagcctctgaaaactaccatgatacaaaaatattttgcactatggggagcttccggagaagctacagaatcttataatgacctccgtagaatgacagcacctactgaaagtttcattcaattacagaataccaagcctttccccttacgttgtccatatggcaatagtgacacaacgacaaacgcagaagtgaaagctgcttatggaaatggacagtatgtttataacgaaaaagtctggtgggcaggcggtaacagataattcattcatctgcaaacaacaaaaaatcgggtagtgagtaacttttccactacccggtttttcactattcttattttaagacaccaaccatcccttctctcactatatccaccaatatcggtttcaacccactgacgaaacattctactgcgatcaccattaagatcaatcccataagacgcatcattacattattccccgtctctcccaagacactcaccaatttcgtggaagcacggagaataaagaaagtcagcagataaatcagtccgatagttcctatcaaaatccctttcatttcgaagttgtgagcatcctgcatcaaaacaatagcattcgctatcgctccgggaccacacaacattggtatcccgagaggagtaattgaaatatcatcagcataagtttttatttcttcatccttcaacttcatcggcgtgtagcgggcttgaagcatatcaaaaccgattttgaagataatcaccccaccggcaatacgaaatccatcagtagagatcccgaaaaacttaaaaagaaactgaccggcaaaaacaaaaaccattaatgtgacaaacgacacaatggtggcacgttgcacgatagactgacgttccttatccgtcattccatgagtcattgtaagaaagacgggcattgtccccaaaggattggtcaacgtaaagaacgaagtgaaacaaagcaaggcaaacgggagaagtgtactatccatggcagtatcgcatttttatgcatttattaaacacgacaaaaatacgacttaatccataaaatctataataaatctatcaaatctttcaaagaataaatgtgataagtaggctgaaaaggaaatgaggtacgaccggttacattgtaaaaagcctggtgcatccctattccatgtgccccggttatatccgcttcccaactgtcaccaatcatcaatgattcgcgcagttcggactgagtggcggaaagagcaaagttgaatatttcaggccacggcttcagtaccccgagatcttcggaaaggataacctttttaaagtagatgtctacgcctgctgaacgcattttacgtgattgtaattcccgaaaaccgttggacagtatataaagattatatttcggagccagatactccaacacctctttcgcataaggcatcaaaccgcttttggtaggaataattgcgaagaaatcttccgagaacttttcagccaaggtctcatcctccactcctaccgcctgcaaaggataagaaaaacgttgccagttcagttcatccttcgttatcttcccctcaccatattcaatccagagttcggtattccgttgctgataaatcgtataataatgatcgaacgaatcaaaataacgttcgaatgaatatttccgatagacttcttcaaaagtatcgcgagcattacgggaaaaagcccagatagtgtcgtcaagatcaaaaaaaagatttctatatttcatcaacagttacgggggtatatataagaaacaaaaagccaatgtgctaatttcttgcattcaggaatcagcacattggcaattcaaaagaggtgtctaccttattttacctgaataaccaagtatctggatatactccagaattcagtaggattcgtaatcttcaaagtcaactgacctttgtcatctttcaccaattcgtaagaaccggcaggatgagtagtcaacaactcagcacgtttagagtacaacttgatttcttttgttgtacggatatcaatctgagtgaaataatccttgttgaaatcagcgcttttcagcacatcaccactttgaagaatcttctgggctttcagttcggattttgttccgaatacaaaccatgcagcattcaagctcttatcctgttcggcaactgtcttagctttcgcttcgttttcggcaaccagcgtttctttggcagcagatagatcgcttacagcagcatccagttcctgaatacggatattcttggaagccagttcggtttgaagttcttcgatacgttgttgtttagcattcaattcagcagtcagagcggcaaccgcctttttcatctgagcagaattataactgctatttttcaactgagcctgcaatttagcaatctgagctttgttttcctccatctgcttggagatgaattcaatatcagaagcgatttgttgtttggcactagcagaattttcggtaatagtaccgcgctgcaagtctacacgactttcggcagcattgatcttacggaaaccttcctgaacttcattgaaagttcccatcatatcatccagttcagcattgcgctggttcagttccatcaacagagagtcattttcagctttcaggtccttacttccacctttaaagccatcacacgaagccaacatggctgcgcatacaaataaaactgctaactttttcatacgtttacgttttacgtttttaaatgaagttattttaatcgtctattcctgctaatactatcacaatctcgccccgcggttcggtagcggtaaagtgttctatcaattccgccagactgccgcgaaccgtctcctcatggagcttggatatttcacgcgacacggttacctgacgttcagctccgaaatactcggcaaactgagttaatgtcttcaacaatcggtgaggcgattcataaaacaccattgtacgatgttcttctgccaatgccttcaatcgtgtctgccgtcctttcttctgaggcagaaacccctcgaagcaaaacttttcattcggcaatcccgaagctacaagtgccggaacaaaggctgtcgcccccggcaagcactctacttcgataccgttacgtacacattcacgaacgacaagaaatccgggatcggaaattccgggcgttccagcatccgaaattaacgcaactgtttcacctgcctttattctattaacaacactttccaccgttttatgttcattaaatttgtggtgggactgcattgcgttctttatttcaaagtgtttcagcaagataccggaagtgcgcgtgtcctctgccagaatcaagtcgacctctttcagaactttgatagcccgaaaggtcatgtcctccagatttcctaccggcgtaggtactacatacaactttcccatatattttttattacgctgattggttaaaatacttctttaacaactccagaaaatcaattgctgcttcattttcttcgttcatatcggctttcgaggaaagaaatgcaacagcagtcttgtaggagctcatgactgatatttgttcgatcacacgattcatcaagtctgtatctccaccaaacaactcgcgtgagaaacggaatgaatcattcagactgatagattgacgtaaccctccggcggacagtttgatactttctcccaatacggtcggcttactcacctcatcctcaataaatacagactcctctgtcactgattcatcagcaacaggttcttcctcttcctcctcaattgtttcttccacaacaggaggttccggttccgctacaaaagtgtctgattctttatattcttctacgataggagaaggcggcaaactttcacaaacagtatccacatcctgcaagagttcatccaaatgtccctgcatccgtgtaatactccgcttcaacagttcagacaaagtctgagtcgactcctttgagaatgactccatgaggtatttcaactcatgaacatccaactcgatatctgttaatagcttctgtttcatgtccgtctattatttaatatggtgcgaatgtaggaataatttatgcaataacttaaaataatggataatttaacagttcttgcatattaaattatgtactaaaaaacatccccgaatgtacttttcggcaatgcaaaaagatacattcggggatattatccatattatcagaatcgacagtatctattacttatagaaacccagaattttatcaaataaggatgagttttcagcaaaaccgcagaaatactgtgaacaggggccataagcatataaaagcgttggaatccctgtatggtcattcgtaaagaaattcccagttacagttccggttttataatcaccgtccaataaagtcaatcctcccgtctcatgatcagagagtacaagtattaatgtttctccgttttgatcggcatattcgagagctttccccaccaagcggtcaaaagacagatattcgtccaccactgtatacaaatcattagcgtggccgcctttatcaacttttgctccttctatcatggtgaagaaacctttcttacctgccgaaagacgggttatcactgtattgaaagattcttctatcacccgaaaattctttccatagtcatctccttgcaaacagataacacgctggtttaaaggaacctgactcagctggggcaattggttacagactgctatattcttctcccgcaattgcttcgtcaacagactatcgtttgctgcaaaagcctccaccggtgcggctatcaccagatctgcaggcgaagtaagcaaatcttccgctatctcttgccccatgtcccgttccggttgatgagcatagtaagcggaaggagtagctcccgtgattccgtcattactgatgattcctgtctgaactccttttgcggccaaagcttccgttatgttttgtattttattacccagagagtcggtaccgatacggcggttacgggttttctgcccggtagccaatgcagttccagctccagccgaatcagtcgtatagtcatttgtcggattcgttttcaacagtccgatattcttcatttgcatcagattcagcttgccgccattagccgtagccgcagcccacatctgcccttgccccgcaccgccgtcggagataagcacaatgacattcttaggcattttcttgcttccgtcatttttataggtgggttgataaatctcatgaaactttcccctgctggtataaaagttcttcggataacgtttcaggaaatcatccagcaaagcaggatggtcggtattcagatagtccaatcctagtttcataaaagtattccaagccgttttggtatcgggacacccccagaaacgtgccgctttcccttcggcatgagctttatctataaacgcttttaccttgttgtaatcggtttctaccattcttcccaatccgttccattgagtcaatgtccggaaagaagtactcatcatgggtatacgcaggctctgttccggcgtatagatgaatcggggtcttccgtcgaagaaaataaaatctgcgtaattggaaaattcttccggtgaagggagaaagccactgacaaccacccggactgccaaaggattcttctttacatcaaaacaatcccgatattccaatagttgctgttccaacaccttcattgtttccttataatctgttttcaagtcaatcagtagctggaagctctttccgttcgggtaaccggagccgccattcatttcaaattgttccctgatcggattcaaataaagattccggagtttacgggctttattaatttcattctctttatgagccacatacaactctccgtctaccagaaacacatcagcttcgatagaagcacaccgtgtggagtacgcagtataaaaaggtacattctgcaaataatcattatgagaatgtacattctcgactgaagaataaacacgtgattgagccgacaataaacaaaaggccgacacgatccacattcctacgatactatataactttttcattctatctatcatttatcatttgtattccatttctgaggttgaaaccataccatatctgtttcattcaccatgcgtccgattttctcatttgtccatgaaatcagattcgggttgttctgctcgttatccgaatagatatagcgcacgggaatagcacttgataccgatgtaccgaccttcaactccggatacccggtacgccgccaatttgcgaatgcctcaaaaccattcagaaaactatcaatccatgcctgtgtacctatttgtttcaatgcttcattctgagctgtattcaatgccacatccggacgtgccagatagacgtccacgtcatcagaagaaatagcagcccacttctgcatagaagctctgatacctttggcatattcatcggctgcattccctgttatcatacctcggataatcgcttccgctttcagaaactgaagttcagcaaaagtcatcacgaaagcacggctttcgcttcggatcgtactgctcaatactgaataatcatccttatcaatctcattctgctctgccgcactcagtcccgccggttgcccgcgatagacaaaaggtacagaagcatttgcccgatgtgcttcaaaagaatgctttgtcggagcaacataaaccggtaaacgaggatcatccttggtttgcagagcatctactatggcttcacttacccggaaattatctccgaatataacacccgatccgtcagaaggcaggtttttaggttgtatataccacttgtagaaatcaacggtattgttatacaccagtgttgcctggtcgtcaatagaagtaaagacgggatattcctgtgcattgttgaagatcgcagctatatcggcagacacatctttcttcgccgactggcgcatcaggatacgtacttttaaagaatttgcatatttacgccatttcactgcatctccattaaaaagaatatcgtcactaatagtagcgtcagcctttaatgacttcaatagctgatttgcagtttcaaggtcggcaagcattaatcgatacacttccttctgttcctgataatgcggaaattccaatccgctgacatctccttttccagcttcattatacggaatatcaccatacgcatccgtcatcaatgagagaacatatactttacagatcaatcccaatgccttatactgaggctgattgtttttctctgcaatatcaaggatctgattaatatcctttacactacgcatcggagcattccattcttcgcggaaagaagccccggttatattgaaacgcccaaaactttcgttacttcctccgatatagttaatgtgttggataaactgtccggcagctccattgccactacccgtcattgaagaaacagcagtactgataacagtcggcaaaagaagattggcaggaacagtcgggggattattggggttgacattaatctcttcgaagtcactacaaccacacaccagtagaaatgcggcaagcaacaaagttattttatttcttttcatgatttctgttgtttattagagagttacgttaagattgaatccaaagcttctggtagaaggtaaagacattgtttctatccctttcagttgcccatcgtaagaagcaacttccggatcaatgttggggacatccgtccagataaagagattacgtccgaaagctgatacagagacgtttttcaacggagtattcttcagccatttctttggaagagtatatccgattttcagttcacgcagcttcacgtaagaagcgtcgaaggtggcaatcatatcgttgtcatagtacgcctgcacgtagtttctcaccggtacagccactgtattcttctgtcccgtttccacatcgataccgtctgctacaatcattccggctccgtcagcatcacgccatgccagagattctttcaacgaaccatttctcatcccttcaatataagtacgtgagtaaacagaacctccgtgctgaaatccgaaaagcgcactgaacgtccagttcttatatttgaaatccgtaccaagaccacccgtccaatcaggattcacatttcccaaatatccccagtcaccgttttcttctaccggcaggccgtttttcagttgcagttgtccgtctttgtataccagataatcaccgtaaagagaaccataagaaccatcgcccttagtgttttcagtacgtaattccagagaggcccaccgttcaatttggcgaatacgtgagattcctttatcttccgccaaagcaactactttgttcttattcttggagaagttgaagttcaagctccattcaaggtctttggtacgcacaggaaccacgttgaccattaactctattccctgattagtcatctttccaacattcatcagtttcgtatcatatccggcagacggattcagcgtgatcggaataatcaaatcagtagtaatacttttatagtaagccacatcgatccctacgcggctattgaaaaagcgaaaatcaccaccaaactcgtaggatactactttctccggtttgatatccgggtttggatagttattattggcagttgcagtagagttacctccccacccttgagaaatgataaagttggaagccgtctgataaggttccaaatcccgacgtaccatagaggtacttgttcttactttggcaaatgtcaggatattgctccttatatcgaacaagtctgtcagcacagcactcagagaagccgaaggatagaaataagaattatttttcttgggcaacgcgcttgaccaatcgtttcttcctgtcagatcaagaaacaatccgttcaaatagctgaactgtgccgttacatacaaactgttcaccttcttctgtgtaagagaattacccgcaagaatcggtttagcattatttgtcaggttgtataccccgggaatagtcagttccggtgcaatggcccccagtcgcttggatatctggttcatcatatttcctccggcagaaatactgaacccgaagtttcttacagcctcatccggcagacggtaactcaacagaaagtcattgtttatttccataaaagaaacgtcatcttcctgataataaccgttgaagaaagattgtgaagttacggcatgacgcatcgttctcttgtccgaatatacatcaagccccgaacggatttgtaaagacagccccttgagaatatcatatttcaaacgaagatttccgtagacacgatcgcgggtatttccgttgagattattgtagaccacaaaataagggttgttgattcctgtagacgtttcatcaccgataggtgtattctgggctacattttcttttccatcacgccactgctgctgcaaggaattcagactgacatttcgcggcattttcaagaaaatagccatgatgttgtcagcgttcttcgctcccgtacttgcccggttgtcgctgttggtatgtacatagttcatagtcacatcggcacgcaactgtggaatgatctgatatccggcagacaaacctatcgtattcttcgccagcccggtattagggacaatacccttctgctgattattagtatacgtcaagcgataattcagtttatcgttcgagttactcagcgtgattgtattagatatattatgtcccgtctgaaggaaatcttccaattgattacctccggacacaaaagggattgcaatccggtttccgttatcatccaacggagagtcaaactgagtaataagctgcccgttcattgcggggccccagttggctacgtccttatcgttcacaccacctccggcaccgtcaacataagcgtattttccttccagcccctggccgaaactgttctgaaattccggaagccgaagggcagtctcaaaagaaacggtagagctatatgtcactccaagtcctttttgccctttcccgcttttggtggtaatcagaatcactccgttagcggcacgtgcaccgtaaagagccgaagcgttcggacctttcagaatagaaacactctcaatatcttcctgatttatctctccggcagcgtttccgtagtctacttcagcttcacctgatgtaaaattaggattattgtagtcctggcgtccggtgaaacttcgagtagactgctcattgttattactaataggcacaccgtctaccacaaataaaggagagttgttatagttgtatccgcccacgaagttttgaccacgtatctgaatactcgaagaagctccgatgccaccagaagaattcgtaatctgcacacctgcaatacggttgctcaacgcgttcacaaaattggattcgtgcgcttgcaccactccgtcacctcccaacttctgtaccgaatatcccaatgatttagcctcgcgggtgatacccagggcagtaaccacgacttccccaagcactttggtatcctcttccattatcagactgacaatctctttttccggtttaaacacaacctttttgaacccgacacaagcagcctccagttcgcctatcttgttcataatcttcaatacgaagttaccattgacatccgttatggtaccattagttgttcctttctcaataatagtagctccgataacgggttctccgttcggcgttttaatcgtacctttcaccttttcaacaggcacagggggatttgccattgcagcagccacactgcacaacagcatcaacaaacaaacttttaccttaaacattgttttcatttaattatattaataaataaatcctgatttacggctgcaaaagtatcggagcggatttacaaaagcgagacaagaaagttacaatgccaacactattttatttcaaaaaagttatgctacctttgtacacacatttatttaatcaaggaagcacgaaatcatatcatggtattattctcagaagatcatatacaagagactaaaagaagaggtagaatcgaaattatctgcggctccatgttttccggaaagacggaggaactaattcgtagaatgaaaagagccaagtttgcccgccaacgtgtggagatattcaaaccagctatcgacacccgttattcggaagaagatgtggtttcacacgatagtcactctatcgcttctactcctatcgactcatcggcaagtatcctgctattcacttccgaaatagatgtagtgggtattgacgaagctcagtttttcgacagcggactaattgatatctgcaaccagcttgccaataatggtgtacgtgtcatcatcgccggactggatatggacttcaaagggaaccctttcggaccaatgcctcagttatgcgccattgcagacgaagtatcaaaagtgcacgctatctgtgtgaaatgcggacagttggcttctttctcgcatcgcacggtgaagaatgacaaacaggttcttttgggagaaacagcagaatatgagcctctctgcagggagtgttatctccgtgcgctcgaagaggacggacaaaaaatataaactaacaattacatatatggaaaggaaaaaaataacattcgacagttttatacgtggtgccatcggatgtgtattggtggtaggaatattaatgctggtggaacgactgagcggagtgttattgcccttctttattgcgtggctgatcgcttacatggtttatccgctggtcaaattcttccaatacaagctgaagttgaaaagtcgtatcgtctctatcctctgtgcattattcctgattacagttgtcggagtatccttattttatctgttagtaccgccaatgatttcggaaatcagcagaatgaatgacttgctcgtgacttacctcaccaacggtgccggcaacaacgtccctcaaaatctttccgagtttatccatgagaatatcgaccttcaagcgctcaaccgtatattaagcgaggagaatattcttgcagctatcaaggataccgtgcccaggatgtgggctttgcttgcagaatctctcaatattctatttagcattcttgcgtcctttattatcttattatatgttatttttatattgctggattatgaagcaatagccgaagggtggttgcacctgcttccgaacaagtaccgtacatttgcctccaatctggttcatgacgtgcaggacggtatgaacagatattttcgtggtcaagctttggtggcattttgcgtaggtatcctgttcagcataggtttcctcattattgattttccaatggctatcgctctgggacttttcatcggtgctctcaacatggttccttatctgcaaatcataggtttccttcccactgtattgctagctatcctcaaagcagcggatacgggacagaatttctggattatcattgcgtgcgcattagctgtctttgctatcgtacaaattatacaggatacttttctcgtccccaaaattatgggaaagattaccggcctaaatcctgccattatccttttatcactttctatctggggctcattaatgggaatgttgggaatgattattgctttaccgttaacaactttaatgctctcttactaccaacgctttattatcaacaaagaaaagataaaatatgatgaagtagaaacaactgataatcaagaaacaagcagtaaaaaggaaaaataattggaacttttttccacgaaacgcttgcaaattaaataaaagtcactacctttgcacccgcaatcaggaaataactgatttgcaaataaggattgattcgctagctcagcaggtagagcacaacacttttaatgttggggtcctgggttcgagccccaggcggatcacagaaacgctggacagaaatggacagtaaatgtacaactcctacaatatcaaggtattgtaggagtttttctttgtataatgtctatgacctaagacacgaaaagggatcaacgtaagaatctgagggattttcattttatgcatataatttagcgagtctatacaagaaaaatgctttatctcttactcctctgaactgtgccctgaacgctttgattttagcattaaatgattctgctgctgcattggtagcccttctttcaaagaagtttattatattcagatagtgcgtttgtatcgagcgcgctacccttccaaaggtgagaaaccccgctttgtctacttcatcataccaccttgcaagccttgtcaaagctatatctttaaacttacactgatgatagattgatcctaaccgcatggccatataatatcctttctttatatcgggatattctttaaatagaatctcggcccgtatcctttgagactgagtccatagagattcttttttgtaaagcagataaatactccttgccagcaactgttttcttgtatctccattggcgaaaacgggcgcatgatacatctttccgcaggtcttggcgtaagctatctgtatggactcttcgtccaaagcctcccagcgagctttcacccgcatctcctgaaccgcttcatacgctaatttctgtacatggaaacgatccgtaacccgtttggcagcagggaagcaagtccgggcaatctgttccatattgggagccatatccaatgttatctcacgcacctggtagcggcgacgacgcgaaagtttaagcaggacagaggtaaccgtgcaaacatccgtacctttaatgataccaataatactgcctttaccaccgtgagtctctttattaatcaacactgtatagagttctccacgggaaagagccacttcgtcaatacagacgtaggcaccaatgttcttctcaaacaggagccagttctctgcgtgagcaagctgatcccagtgtaggtaattacttaaatggttgcggtattgacgttccaacaaatccccgtcaacgccatataaagtacccaataacttgcaactgatcggataattatcaatatagttcttttaaaaaagacgcaaagtcttgcgtcaaacgagtaccctcagccaccatacgccaattgcgggaaatatactcattgctgcttttcaaaatccaacggcgacgacggaggttcaaaaagactttcttgccacgaagaggaaagtcttgaacaacaacaggctcataaaaccctttactctctgtttcttgaccagcatacttctcggggagctgattcttctcctcaaggtaaatgataacttcattcatgctttccttcacatcaacaagatcaaagtaatccaaagttccttcaggaagaagaaggtgataaccatttaacttcataagctattaatttggagacaaagataacaatttatatatttaaccctcagggttattcattgatcctttctcagttcagttggagttgcaccaaataacttcttacaataacaagtcagatgtgcaggagagctaaacccaaagtccatagctatttcccggaaagcaatatccggatcacaaattttctcacgaaccagttcagccctccgctcctgcatccatcggtaaggactctgactaaaactctcttgaaacttacgattaaaagagcgttccgaaacacaacacaaacttgcaaattctttcaccgttttcacattcttataattatccagtacaaaatcctcgaacttccgtcctactccagtcgttctagaaaagaaagcagcaagttctgatttagtataaaaccccctcaatgcaagaatgatttcctgctgcttaaggatatgcatatgcctacatagcaatcctgtatccagataaaaaagtaactgcctcaaaatatgtaacagaggctttcggattggtaaaatacaattattaccgttctccatttttacatgtgagattgattcaaaatacattttgtcacaagccgttatctgcttattccaaaacaacaacagacattctgccgagacaataccttcaaccctattttcttcatgctgcggtataagcagcatattatgctctaaaagatgtatattatgctccctgcctatattaacggatagttctcctttcaaaagaaataaaatacaaaaacaacaactattatcaatctgtccggattcttgcgcagccaatctgtattgggtaaaaccactgtcaattttaattccataattaaaacaggaatgatgttccgacaaataaagtaatttcatgttataatttaagtagtttaattttaaaacaactcgcttcgcttactatgtttgttttttttaaagacacatacttttaaactacaaacaaaaactgtaattctataaacatatacttaaaaaggaatatatatctgcatccattaacgactctcgctccctacatgacacatatagccctaacttagccacaagcaatatcgtctttcaatatacttacttcattttacatatcttcctaagtacaaggaactcccccaccacacaaactattgcgataaatggggaagtctgatgattataaagcagaactgcttctatttattatacatcttctatttttctatcacttcttatttagaattaatagtacaaatacttacccggttccaatccggttcctcaaacatatagccaattccctgtccttcagcaacaattcgctcctttgaaatcccatacttattaaccagcatcttttgaactgcctcggcacgctgtcgcgcaatacgctcattaagttcttcactaccctccggagaagcgtaacccttgattacaactcctgcctctttgtggtttctcaagtaaattgcaatccgttcaacattaggtaattgagaattatcaatagttattctaccttgacgaaaagtaatcacagactctagtgtttttttactattgtcaatcgtatctttcacaattttcggttctcgattcttgtattcttccaaagccgtttctaaatctgtcactttttggttagcatcctgcaatacattatcattgcgttcaagttctgaacgaagttgatttatttgagcatttaatgcatcaaattcagactggtcgtaaggtcttactttagtaaaatggtgttcaccattgctacatctgaaatgatatacgaagcctgcactaatctcccacacggcacgccccgaatggaaatatacaggtttcgtacccatagaattcatatcatatacaagagccggtttgagagctagagtccacgccttactttcccctaaattaaaattaaaatttaatcccaacttagtagacataccattttgatcttcccccatgtttctaccaacataataatgcatccagccaataccagccacagcctcaatctcaaaacttcttggaataccgttataacctccaaaaagattatttaaattcaccaatcctaacaaacttacatttgattcatcaaatgctgttttactttttgttgtattaaaataacccattgcctcaaaacctaatccaaaggtaggggttaaatgcttgcttacatgaactccaactgccgaacgcatgtttttaaaaaacgagtgatgagtcaatggggtcacgccacctacattaatacctattgaccaattatccgaaaatttgtttccttccaaagctgtttgtccacttacatggcaaatggcaataccagatagcaataagcctgcaaaaatctttttcatcataattcttatttaaatttattattagcagaattggggctgaaatatatatcattcccaacattctacctttagctatatagttgactaactactactttcatttacaatacaaaataaaatcacccattgtgagatatatgtttatgtacgtctttctcagctgctgtaatgggacctacccacgaccacgattctacggtcctctacgtaaagtcatatttttctgttgcttttccatattcaacaaacactaatacggcaaagtgaactaattgtaatcagctatctcataccaaatcaaacattgtataacactttgcaaaagaaggcaattcctatctcaatctgttacaaataaacgacattatattttatgcatcagacaactatcattaatatagaggcttcataatttggagattcatagtttaggctataattcaagcgggagaaataattacataacataaagaacctatttcagcatatctcccccttcttagaaacacgttttccagaagtgatattcattcattgattttattattatccaacaacacaacacgcacccagtcaacccacatttctcccggcaaatcttcatcatggatttctcccggccatgtcatcataccattcaattcacctcccaatgaaaaatttagaattatattgaagggatattcacaaaatggatactgtagtttctccttatccaaatgttggttctcatatttccaagtctctttgccgtcgacataaaatattaattccttttcagtccgctgcactgcatatacatgatctttagttacatcaaaattcttatcaggctccttgttcgttactcctgcagaaccattttcaccatttatataaaaagtatgtaccgtttgaaagatctgcttaggactcccttgtacccattccataagatctatttctccccctctgggccattccggtgctcctataggcatttgccagatagcaggaaaacctccacgaaccaatttggttaatctggccttaacttccaaacgtgtaccacagggaaaacctatcttggaaaacaccccgccatttttataagtcccgttgtccttacaggccctcaacttcaaatagccttcctccacctttacattttcgtaaccatccacacccctaaaatactgtgaccaggcgttgttggcatacgtacaaagtttccagattgctgtatcgggcacaacacatttcgcatcaaaatcatcaacaaataaaatgttttcaagtgtatccgatccgatttgctccttttcttctgcgcatacataagtaacagtcccacctatagcaaacaataaatagcacaaaattgatctcatatgattataaattaaaaagattaaaaaaccattctttcttcaaaaacaatattacctcatcgaaagaagagttgtcaccacaagagtgctgacaactcccttcgacaggcactgtcacctcaaaaacaaacttttacaccataaatattattctaaatcatagagtacattcaggaccctataaatctattttacaaaagactatttccactgatatacccgcacataatcaacttgcatggtaaaaggcaaatgtttctcatttataggaccagccattccctttccacctgcaacattcaatatcaagaagaaaggaatatcaaagggccattgtactgcgcccaaacctttgttataataggttgcgcaaacttctccatttaccataaaatcaattttcttatcgttccattctattccccatatattccattcaccctgcttgaatttagaccctgaatgaccaaaaggatatgtcttttgctccgtaccagtagtatgtaccgtttgtacagcaacatctaaatcttttatatgctccattatatctatttcaccacttgcaggccatcctccgtattctgaactggcaggcatcatccatatagccggccacgaaccattccccgatgaaaacttagctttaatctctactttaccataagtaaaatcaaactttccactatcagtgcgtatacttccagatttatatccgcggggatctgtttcatccttcataaacttgagattcaacaaaccatcttcacaccaaacaacggatgtatcattcggcttataataataggcatgagcaacatctcccctgggagtataattccacttcttggagtcaacggccccatcgatattaaattcatctgaaaaaatcagaacccacgatttatccactctttcaacggaatcttctttctctggtcgcagcacatcaatggaactgtcagaaaagtcgtttgaacatccgaaaaataaaactgctaataagggtattatactttttttcataactcaacttcgtattattttatattatctttatactaccataaacagatataaaagtatatctagccggaatacgaaactcctcccttccaaccggacatattctcgtcatatcttcttctattcataaccaggagtctgctccaatgccgaatcattatcaagtatattctgatccaacggccataaaactttatatgcctcagtcttctgatcaagaatagcaactttattatcaatatcaccttctatacagaacactaatggaataccgtcctttgcattcttcatgcggcacaaatcccaccaacgttgtccttcctgtacaaactccttatccttttcatgtaaaatagctaattcattagttagaaaatcagatgccttatatatatgtgaacctgcctcagacttatacgccctatttctgactaaatttatatatttctcaacatttgcattatcactctccatattagcaatctcggctaatgctagatatacccaggataaacgataaagaataagatcaccatcatagactctatttccctgagcattgagagagcccaaatttttacatacatgagtaccatatacatacaattctccactttcctttttccgatatgaaggcataaatgtggcgtcacaacgagtatcacctttttcaaaactattataaagcgaaagtttatactcatatttctgttgaccattattctgtatatcaagcgcatcatcccatggcgttccattttctctaaaactatctttattagtcgtcccggaaacaagagaataggtatatccacgagaaagggagttttctgcttcaccctccatataagacacagccattatcacctcactattacctttgttatcagcactgaatatacgtttaaaatcttgttgcaattgaagtccatagttaccctctacatctttcaagtacttcttggcctttgacaaatccgattcggtagctttgttatcaccaatagttactttggaattccataaatatacctctccagccaaacattctgtggccgcctttgaccaatacaccttggtaccatgtccatatgaattaaaatcagaattctctccaaaatattgtagggaggtttccaaatcctttttaatctgtgatataacttcacttggtttagctctccccaaataaagtttattcggatcaagcactccatcgataacttccacgccaagacgaattggtaccccaccatagactctataaagatcaaaatagtaaaaggcacgaaggccatacgcctgtccaagataataattctttttagcttccggaatgaaattagcatcagttacacgagctataaaaagattgatattggttatacagccataaatatttccaaacttggtaactccgggagtctccttagacagattttgtaaacggatttccccactagagatagccagaccatctgcacttgtgccatccttataatgtccgccccttaattcgccaaaagtgataatatgctgttccgccatatctcgcaattgtttatgaagaccgtcaatatatgcactgacttgggattctgttttccaatagctggtacttccataattatctatcggggcgagatccagcatatccccacatgatgtagccactatagcagctatattcaacaccataatatgtataaattttaaatttctcatctcacttcgaattattaaaatgtaacattaacgccaaatataacggtacgtggcaagggatatcctgacgaaatctccgggcttaccgtcctggcagaagttaaatagcccaaattctgtcccgttattgagaattgcagtttctgcatatatagtcttttagacaattcttgaggaagagtatatgacaaagacaattctctaatccctaaatagttacccttagaggcaaatagagttgaggtacgatagtaattggcagctcccacctgatcagcaaatacgtaacggggatattttgcgtttggattactttcgctccatgtattaaaaacatcctttgtcgtattgtaagccccctgcatacatcctaaaaaccaaggagtcttatcatcataaacccaataatcaagcgcaaagtcaaaacgggcatacaaactaagtcccttccaagacattgtggtattaaaaccaccataccaacgaggagtagtatttcctattacaacctgatcatactggtcaatcaccccatctccatttacatccttccatttcacatctccgggttttaactctatgccttttgcccgctcattatcagaaagtttattccaagcttcagggccatattgatatttaccttgaatattccccgaggtcacaaccaaatttcccggaatatcatcaacacttctgtaaataccctcggcctggtaaccgacaagtatcccatactccattccctcctgaaaacctccgacatacaccttctcatcttccaacttacctgtacccggatttacaaccttccgaccggtatacacttgctgtccattctgtctgtttcgtacctgcccgttatcaggaagggctataatcttattcttattataagttatattaaaagaagcatcccaagtaaaatcgttgacatccaacaccttaccagagagttgtaattcgattccgctattacgtaattttccattattgttcttaacagaagagaatcccgtggtcgaaggcagggtgaagtctgcatacttatcagatgtcaaacgattgtagtaatcgatatccaaattcaagcgtcctcccaagagtcctacattcaagcctatatcaaaactggccgtcttttcccaacgcaaagaagggttaggcaaagtacctatcagaaaaccattgttgccatggtatttattagaattatatgaaccttgaagagtatatggaccgattccgctggcattaccattcaaaccgtaactagccctcagctttccataatagaggaaaggaagtgattccttaacaaaatcctctttcgtaaaaacccagccaccggaaactcccggaaaaaatccccaccgattcttacccagcaaagaagaataaccgtcataacgaaataccccggagaacaaatatttaccctcatagtcgtagttcaagcgtcctaaataagaaagaatacggtaacgactatgattcgaatctatctgacgtttacccttacctgcatcggtcagacctaaatctttaaaatcgtcggtagcagcaccagaaccggatgcagagaaaccgttattatactgatcataaaattcactaccaaacataatattcaaattatgaacagcagaaaatacagtcgtataatctagaacagcattataggtctgagagaactgacgagaatagcttgcactagttgaacgagttcgattccattgtcccggaaccgtctcatagtccttgcgcatactttcttgtacagtatgaaaataataccaactggcagaagccctcaagaccaatcccttgaataaattagcttctaatgactgcataagggtaaactttgtccgttcattatcctgatcgtaactttttgcaacataagtctgattaccgtccccgggactaggacccaatgtcggattaccatcctcgtcttcaaaacggacagtaggaggagtactcatcacccgaccaaaataatcactttccgtcccccaggcgttgtttaaccatacataattagcccggctgaaagtcgcattggaagtcgttttcaaccaatctgcaattttgtacgaaccgttgaatgtgaaattataacgtttatattcggtagtgataggggctccgggggagtcattataacccaaacttgcataataagttcctttatcattcccccccgacatactaaccgtataatcctgtgtcactaccggattacgaagattatattcctccggttttgtccctttataaatgattgttttagaagggtccaaaggatccagcatttctcgccagcccatatccaaaagataggcattttcatccgttttccccataatattccacaccatattcgcaccgagcttattacccgtaccaaaaggcgtagaacctgtaagatttgccgtagctgcccacggggtatttttataggctgtacgaaggactgtaatatagtcttccgcgcccaaaaagtcatagggattattaacataaccgagacctatatttgctctgaaattaatttcccgatgtcctgcccggccagattttgttgtaattaaaattacaccattacttgcacgggcaccgtatatggccgtagccccagcatccttcagaacatccatagatgcaatatcctgaggattgatatcatcaaaattatcacgaagctgtccgtccactatcaccaggggtcctcccgaaccatcaaattccgttccaccacgtaatataactttaggagatgaagtaggatttcccgaagtgagagaaacctttaaaccgggaacagaacccgacagtgcctgagagggatttgtatatatacccttctctaatatctggggactgacagtcgatatagaattcgtcagttttgcccgtgaaacttttccgccataaccggtcacaacaacttcctgcaaaagttcactgtcttcttttaagattatcttaaaattcatttttccttgcacactcaaagtctgggaagaaaaacctatgaatgaaatctgtatactggcattatcagaaaccgagagtgtaaaattaccatcaacgtcagaaacagtgccatttgttgttccaacttccacaatactggcaccaatgaccgcctcacccgcagtatccgttattatgcccgtaatacttttcttctgtgccacaactacaatcgaacacagaagaaaaacaaataaaataaaactctttttcatactcttttatgtttttcatgtttaaaacacctatcaacaagaggcgttcaaataccatatatccactccaaaaacatcacaaattacggaggtataaacaaaggaataaagaaaatcatatttaataaattaggggttattatttacaagcgcaaagaaagaactcataaaactaaacatagtcagaaagcatttaaaaaaagtcatatatcatccaatactgcatttttttatcaaaaacagaataattaataaacattttatgtatatacgttgttaaatagaaaaaaatcagctttaaacaacacgaaaagataaaaatgtacaggttatttggtatattcgcaatattaacactactttgcatatcatctacatcaggtcatgacataaattaccagtttacgtctatttccgtagcggaaggattgtctcaatctaccgcccaatccatacttttagataagaaagggaaattatggataggaacaaaaaatggtctgaattcttatacgggacaaaatctgaaaatattcaaaagccaccccaacgacagatattccttaccaagcaatcacattatacatttaacccaagattcccttaacgacatatggatatctaccagacaaggtatggttagatatgatgagacacacgggaattttattcccttcaatcatgatatcatctattcttccttatgcataaatggaggagtacttttcggaagtgagaatcgaatatacaaatatgattaccaaaaacgctcttttaaagcagtatgcatcacccccaaaggtgctacggacagtgacattaccaaatatagggtacaaagaattatagcagtttccccaaaggaggtgctaatcgtcaccagaagggatggaatatatatattgaattaccccaatatgcaattaaagcgttttttctcttgtccaaacaatattttacaaggagcatgtctggcttcaaacggatacatatatttatctttttggggacaaggcctgttttgttatgagaaaacaggaaaacttataaaacaatatacgagcaacaactccggattgacaaacaattatgtattggatataatagaaaagaaaggatatctatggttagcaactgatggcggaggaataaatcgactggaactacgcaatgaaaaattctctaacctctatcatattgccggagatgaaaattcactccctgtcaattctattactgtattatataaggatagcaacgaatgtttatgggcgggaagtgttagaggaggagttttcaatatcaaagaaagttacatacgtacttataaagactgtcctttaggatataataatggattgagcgaaaaatctgtgacgagtttttacgaggaagctaatggaaagttatggattggtacggacggaggcggaataaacttgtatgatcctcaaacgggaaacttcaagcacttctcgtctacctatggggataaagtgatttccatagccccagtatcagaaaaagaactaatggtatctgtttacacaaagggacttttcctgtttgaaaaaaacacaggtatttatcgaccgtttgtgataataaacgacagtattaacttcaggcagtgcttttacggatatcttccacgcgctcaccgagtgacagaaaacaaaatatatatacttagtaaggagctatgggtatataatataaataataaaaaattctctccaatcaaaaatgagaacaattatcaattacaagcctcggtcatagcctactgtgacaaaaagatatccttggcaatgaatggaaacaaagtattccgaatcattaacaagaatgacagcattgatcttctttttcaattggacgagaaagaagttatcagtgcgattgattacgacggaataaataagatatgggtgggaacaacaacaggaatgggatattatgatataaaagagaaaagatattttaaaatcaggtcacagttattcaatgatattaccgccctccgttatgagccttcttcagaaaggatatggatctgtgcacaaaaccaactattttcttactgcataaaagaaaacagatttattcaatggaacagaagcgacggattttatcccaatgaaataatatttacttatcaacaacgggctgaaaaaaacagccgatatctttactttggtggcatagaaggactggtccgaataaacacagacatcccagagcctaatgaaccagatccggaaatagcactttacagcatagaacttaacgggcaaccgtatacatccggtatagacacccaaaatataaaagttccatgggaacataatgcactcgccctacgggtatatattaaaaataaagatattttccagcgagttccattccgatatatcataaaaggaaatgttgataagataatcgaatcatataatccgatattggatctttccaacctatctaccggtaaataccgcatcgaagtagcatgtatgacaaaagacggaaattataccactcctatccttctcacaaatgtccatattaccccaccatggtataaaacagactggtttataatattatgttgtattagccttataggagggggtattgcaggaatattcatttttaatataaaaaaggaagcaagaatacaaaagagactaaaagaatacagacaatatctgaatgaaaagaggatagatttcctcattcacataaatcacgaattacgtactcccttaacattgatttatgccccactaaaacgtctcatggacaaaagtgagatgcaaggattacctcagcatctgataccacaattacaactactattcaaccaagcacaacatatgagggaaatagtagatatggtgttggactggagcagtttggaggcagactataataaattgaaaatacaaaaaactcaattgaacgaatgggtaaccgaggttatcaaagactatatgaatgaggcaaaagaaaaagagatatgcatacaattacaaatagatcccaacatagaggaggtatggtttgacaaacaaaagtgtcaaacagtactatcaaacttactgatgaatgcactaaaattcagtaaggcaaacagcaatataacagtaagcacgcaacgtcttgaaaacacagtcagaatatctgttatagacgaaggaagcggtatagaagattcggatatggcaaatctcttcactaaattccacaaaggtaatcacaaagagagaggaagtggattcggattatattatgccaaaacaataatggaaatgcacggggggcttataagggcctataataatacaaacaaaggagctacattctatttggagctgccattgctcaatacaaataaaaaagaagaatccgcccatttacagcaaaaaggctctcctctcccttccagcatccaagatacacatttcgattgtaccggaaagactgtgcttattgtagaggacgaaaaggagttaagggaatatctcataagttctttaactgagttctttaagaaagtttatgcggcagacaatgcagtctctgccttagaaatctgtcagaagaaacagccttctattattattagtgacgtgatgatgccgcaaatggatggttttgaattatgccgtcagataaaaaacaacatccagataagccatatccctgtaatactgttaacagcacgttatgaccagacagggataacaaccggatataaatccggagctgatgcttacatccccaaaccatttgatctagactctctaaagatcgtcatcggaaatattttaaaaaatagagagaaaatacacaatcaatacatatctatcaaccagtcgacttctctccagactttaacaaacagtaaagcagatgaggatttcatgacaaaaataaatataattatacatgaaaacctatctgacgaggaattctccgtccagcaattggcagatctcatgacaattagccgttcttctttatacaacaagataaaaattataacaggtttgggagtcaatgactatataaacagattacgtatcgaaaaagcgatctcactgcttaccaatacaaatttaaacataaatgaaataagcagtgaagtgggttttacttatccccgatattttagttcaacattcaaacaaatgaaaggaatgactcccaaacaatttagagaggagaatcgtatgaaataagtaggaagttcctgggaaacataacaagtatgaacgggtggatacaaagatataatttccttcttaataaaaaataaatgtcggaaccgtgcaatgggaatcatacgcaattgcctatatttgcgctattgaacaacaaatacaggtataattatggaacacaaagctgataaggactatgtggctatcatttcactccggaagttacctcaatactcaaaaagatctattgcttatttccaaagcagagggacggataataactctaagaatgacctgctaccatgtcaatagaaataaaatattttaaagatagaaaagagtggcgaaaaaggatataattgccagattgaaagaagataaaactgtatggaacaattatcaacttttttccgacacatataaacgcatccgaattgcctacattgaagcagcaaggaaacggcctgaagaatttgaaaagcgattaaacaactttatcaataaaacgagagaaaataaaagaataacaggattcggcgggattgaaaaatactattaatccctataaaatacctgactcaaaataaaaaacaattcctctttgataccgccccctaaaatgtgcagaaaaccgaattgaacaaataggacactcactctatccttaccaaatgataaagtgtcccccgataagactttcgggaaggaatactcagcttttgaagcgtgcatccgaattgtgccaccttattgatagctaacctgtcacgtgtctttgtctgcaaatagttcaatatctgcatggaagtcatccacttcccttcttccgcttcctcatccaacggactaggataacaatgaaataactgttccaacggactcaataagttcgcgcaaagtcataatgtgtcccgattttgtttccgttttcattttgtcgaacaatgtgcctgcctcacaaacactgagagtttcttttccactcccgctatcttgcctgataaaagtaatattcattctatttttgtctattttctacaatcggaatttattgttttaattcttgtaaagatacgctataagcttccggaaagcaggcatttctcctgattaatatccgcattttatttgtattacactcagatttgatgtatctttgcttaatagttaccagaagctcactagtgtgaacaaataagctatcagttgtaaacaaaaacgttaacaagtgtaagcaatcttattcacagcagtgagcccctgagaagcattaaggcttaacaaaacaaactctaagcattaacgtataactacctaagagaatacataacaagaacggttactttaaaacaaaacatgaaactatggcaatattatttgactggtatgaaaacccgaagccttcggacaaagaacaaggagaaaagacactgcacccacgtctaaaatataacggttcgataggaaccgacgtattgagccgacgcattcaagaacgttgttcgctgacagaaacggacgtcacagctgtactcgacgccctttcgcatatcatgggacaggaattggcaaacggacggcaagtacatctggacggtatcggttattttcgcccttgcctgaccagtacggaacccgtaacgatagataccaaacgaaaggctaccaaagtaaaattgaaagcgatccagtttcgtgccgatcagacattgaaaaatgaatttgggatactgaaagtaaaaagtctcaaaggcgggctcgacttctcccaactgacgaacgaagaaatagaccggaaactgacgaaatacttccaaacacacccattcatgcggagatgtgacttccaagacctctgcagaatgacaagaagcacggcaatgcgacatatccggcggctacgtgacgaaggaaaactgaaaaatgagggtggagtgatgcaaccgatttatgtaccaggaaacggttattatactaataataaacatgttacatattaaatagtgggaattagtaacctgagggtaaaaattaccctcaggttactccaacttaactctcatagccgcaaacaacgatgtataaagggattgaagctatctatgagagtatgagagtaaaatcatcactaacatctattgtatgcattttctttcaccgctattgttccatacaacatggttgacggacaatgcttacatacatcccctaaccccgcattcaacattttccagcattcggcgttttccggcacttgtccggcttcttccccgaaaagcttgtttgtaaagatcaccttcatcgtgtcataatcgctcacgaagatattggcattgatattccagtaccgattgtgacgccgggcagaatgttggagtttcctccaacccacacattgttgcccaatgtcacaggagaagtaaaaagatttccagaactgaaaagaaataagattgcccgtaaaacaatattttaccggcaaacgttttctttatagtatttttttaagttattttgcgcaacagatatcacgaaatcatcaaattatggattggattggccttgatttaacattccctattaccgaccctacatggatatttctccttgtacttctcattatactgtttgcccctattttattgaacaagttgcgcatcccgcatatcatcggtatgattctggcgggactggctgtgggtgaacatggattcaacattctggcacgcgacagcagtttcgaattattcggaaaagtgggactgtattatatcatgttcctggccggtctggaaatgaacatgggagatttcaaagagacacggaacaaggcgttagtcctggggctgctcgcttttattgtacctatcggaatcggattcgttgccaatgtgtcttatctgaaatatggtataattacatccgtactgctagccagtatgtatgcctcacataccctggtggcttaccccattgtcacccgtttcggggtgtcacgtcatcgtagcgtaagcattgcggtaggaggaacggcagtgacggacacactcacattattggtgttggctgtcataggcggtttgttcaaaggagagaccggtggtttcttctggttatggctggtagtaaaagtgattttcctgggtggactaattatctatttcttcccgcgtatcggccgctggttctttcaccgctacaatgaccatgtgatgcagttcattttcgtccttgccatggtctttcttggagcaggactcatggagttcgtaggaatggaaggaattttgggggctttcctcgcaggattggtactgaaccgactcattccacacgtttctccgttgatgaatcatctggagttcgtcgggaatgcgcttttcattccttactttcttatcggagtgggaatgttgatcaacctgcgtgttatcttcggacacggagatgccctgaaggtggccgccgtaatgattgtaatggcactgacgggcaagtggattgcctgctggctcacgcaaaagatatacaggatgtccgttctcgaacgaaacatgatgtacggattgagtaatgcacaggcggcagctacattggcggcggtattggtcggatataatattatcctgcccagcggcgaacgtctgttgaatgatgatgtactgaatgggacggttctgctgatcctcgttacttgcgtagtcagttccctgataaccgaacgggcggccaagaagctggccatggatgattcggaaccgggaaaagagtcttcgacggaaactgaaaagattttggtatctcttgccaatccagacaccattgaagacatgatgaacctttctttagtgatacgtgatacgaaactaaaggacaatcttctggcactgcacgttatcaacgacgacagcacttccgataacctgagaatgcgaagtaaacgctacttggaaaaagcggccatgacaacaacagcagccaatgtttcgctgaaacagctgacccgctatgacttgaatattgcttccggcatcatccactctgtgaaagagaatgaagtaacgagtatcatcaccgggctgcaccgcaaagcgaatatcactgattcatatttcggaatgcttgccggaaacctgctgaaaggattaaattgcgagattattatctccaaattcctgataccggtcaatacgataaagcgaatcgttattgccgtccctccgaaagcggaatatgaatccggctttccacgttggttggagcatttctgccgaatgggaagcacgctcggatgtcgtgtgcatttctttgcaaacgaacagacaatcgtccgcctgcaaacgtggataaagaaaagacataaacaggtactgacggatttctctcttttagaggactggaacgatttactggtactgacagggcaagtaagctacgaccatctgttagtcattatcagcgcccgtcccggaacgatttcttatgacaactcgtttgagaaattgccgagacaattaggaaaatatttctctaataatagcctgattgtgttatatcccaatcaatcgggtgaaccactggacagttctttcttctccaagctatacaccgatactgaaacccgacactatgagaaagtgggcaaatgggtttacaaatggttcaaaaagagttgataagcggtatattccgaccacaaatatatgccatttgaagaacaaggctattattgtaatctaatttatagtttgactacaataacagccttataccatcagtcttgcaccattaattttgtataatatcacccactaaaagaatatagccgagataggtattaaactcattgaaatattcagtttcctttattcgcttcggattcatcttgtagatttccgccttctcaaaacgtctattgtccggacgaataataattgtatgttcttcttcattcaaggactcaaacagacaataattagtacgattacgatctccgcaatatttatcaaacctacggatataggaaggatcattctgatctatctctactgtcattcctccggatgaaggtccgattaagtcaaacaccccaactcgaattcccttaaaatgcactttcacaaaatcttccgaatccgaggattccagaacaaccggcaatgctttttggtctccctgaaaatttgaaaaggctttatcatctttcgagagtagtttccaaccttcggaatgttcaaactctgttacgggaatcattttagctttctcataattacccggatacaacggagctttcaatgcatgtgccttttcctgcgccttgttcatttgtaacagggaacggctcagtgtctttgtatatataggatgtccgccatcataagtaggatgtgtcccatcattcgtaaacacaatcttaccactatactccttttttgaatctcctttaaaaaccaacttatcctcattcaacaattccagaacatcatcggcaaaattaacagacggaatatcataatagtctgctactgtctccatataccgcacagaacggtaattctttcctgctttcaagtcatccaacattggttcatttagcgtatagagaaaacatatatccgtatgcggattatgatgccagatcttacgtacaattccttccatggaatgagcgatcaccaaggagtcagttttggcatcattcacagcaaattcgacaaataccaaatccggatgatactgcaacacgtcccgttctgtacggaacacacccaaatcggatccggtcccaccaattccggaatttattgacgtaaactgtacattactatattgttgcttgagccaatcagtaatttgcactctatatccttgatgatttgttatacttccacccaaaaaaacgacagatacgggttcattcttttgtatcttataattaaaattaggaagtcctgcacgcatctgtaaccctgcagagtcttctgttgtagtacaactcaaacaaaacccgataagacaagctataattccactaaataaaaatttcttcataagtataatgattaaaatgtaaacagtttatgctccaagttgaccggtgacttacctttgaacggaagctgtcccaacaatatccgtaataaagcagaatgagtggaagcatcattcgaataagtatttatataagtcttgacacgttcaaaatattcatttccaatgtaaggactacctaatgaaataacaatcactttacttttgtccatagaattggcagcccatacggactgagcctcatcgtcccataattggagcgggccaaatggagtatgagtattccgtgctaccagaaagattactttatcatacacttcagtcgcattatcctgccaaccttgatcttcataaagtatattacggcggaaatcaacctcaaaaccattcttcacaaactcatcccgcaaattctgtaatcgcttaaagtcacggtcgttacctttatgagctacgggagttacagccaccaataacagctttttatctttttccaaagaaagtggtaacttatgatcttcatcccgtactaaagttatggaacgctctgttatctctttggcagcttcccgtatttcagctttttcttctgctgagacaggacgtatcaactccctgtttttatttaataacccaaaacgttctttcattgcccaaacacggcgaacagcatcgtccaaccgttccattggaatttcaccacgttgaatccgtacttctaccgtatccatgtattcgtaagaaggccacaacaatatatctaccccggctaaaaagctggcaacttgcccttccaaatcatttttataccagccccggaaacctgccattgtcatcgcgtccgataccacaaccccgttaaaatgcatttcttttttcaataacccagttaatagctcatgggataaagttgccggaggcagataaccatttatcctttctttctgatagaaaggtaaagttatatgtccgggcatgatacatgcaactccttttttaatcaactcggcaaacacttttccatgatattgcttccacatttcttcagacaaggaattgacagttgtcatcaaatgctgatcacgataatcaaccccatctcccggaaaatgtttgattgtagcggcaacagagttatcttgcaacccctttatctgttcggacaacaaacaaaccgctttttccggattatccgaaactgaacgtgtatttacaataggattcaatggattcatatttaaatctgcaacaggatgtaacacccagtttatacccaacgaacgacattctaatgctacacttttaccatatttataagctaattccggagaatttgcggctcccagtgccatctctttcggaaaaggagtcatcccttgaagtcctactcccgattcataatcctgttgaaacaataaaggaagctctgatgctttttgatattcctcgacagaactacgcacaaaatcaacccgctcttcctccggaactcctgtaaacaacttccaccccataaaataacctgtaaccgggtaacgtttgaagtacacgtccaatgagccgtctcccaaatccaattctttcttgcgatcaggtaacattaacattgtctgccctatcttttcacgcaaagtcaaaagtttccaagtggaatctaccgactgaaattcataaacctcattaaccgaacctgctgtcactctttcttttgtacaagaaaagaacacggatacaagcaatgtagcagtaactattaaaaaagagtttttcataattcatttcactttgtttttcatgttacaaaaatagcactccttattttaatccattagaaatcatgtttcaatcttttccatacatgtatctttattcctactccggttacattactatcacacaggttacgtttttcgttttcagcctcgattttgtttgcgagttacttgcaaacaaattatatttgcttctactaaaaatatctatcaggacatgaaaaacattgcattcatcatttttcttctgtttatttccatttgcagagcgcaagacaacaacatattgtttcagaactataacgtaagcaacggactctcacaaaacaccgttatacgtagtttggaagacagtaacggagttatgtggttttgcacgcgggatgggctgaaccggtttgatggtaccgagttcgaagtttttcgcgccgacggtcagccgcactccctatccagcagtgatgttaccaccattattgaagaatcgcccggagttctatggatagggactcacagtggactgaatcgctacgatgtatcctcaaatacatttactcaatactttcatgatccggcgaaccagtatactatatcggacaattgcatcaaacacttgttgtgcgataaccaaaaaagaatctgggtaggcagcatgaaaggactcaatctgtataataaggaaactgatgattttatccccatttcaaccaacggttctgtcttctggcttatgcaaaacagtcaaaatgaaatctgctatcttatcaacaacacattgtgcatcatgaatcctgtcacctatgttacagagcgttttcaattcggtgatgaacataaaatctactttttatatgaagacaatgataaacgcctgtgggtaggtatgtgggattcaggacttaaatggtttgaccgtaaaaaccgtaaacttgtagatgccaacctgacaatggaaaacggcaaaaatttcaataactcccaagtcaactacattgtagaaacgttggaaggaaatcttatgcttgccacacgtgaaggagtgctgatttatgaccggcaagcaaacaggcttatcaattattaccaacgggaacaaagctgcggtttgagtgaaaataccatcatctctctatatagggataaagcaaataatatatggatcggaacttacggaggaggtgttaatttgtacacaccatacagtaatttctttattcctcataaaccagaatataagctccagaaaagtatcggaaacattaatgccatagtggaatataaagagaaactttggttaggcacggacggtggtttaatcatctacaatcccaaagacgaaagttatgagtactgcccgcttcatgttccacgctcggtaacaaacaatgaagtaaagtatatacagaaagaaggagatcatcttttatggattagtatttattattgcggactatatctctatgatatggaaacccgccgcataataaaagaaatacccgattttccttataatcaagtaagacgtattgccaaaggtactgataatatttattggattgctttaggagtagacagccccatactacgttaccacatggagaacaaccaattggaagagtcttttccagtaaagggtcgtgccacagaactttctatcatcaatgtacaagatttaaaagctataggaccttatatatggatggggactcgtgcagccggtctatatcgctatcacacacagactcatgaattaaaacattttggtagtgaagaaaaaagtccggaacaattcctgccaagcaatcatgtcagtacgctgtatactgatgcatcggaaaatttatggataggaacttatggcggaggcataggattatataataatatcaaagaaagtttcacgatatataatgaagagaacggtcttcccaataatgctatcaacagtattgtggccgataataacggtaaattatgggtttctactttaaaaggcatgtcatgttttgaccccaaatcagagactttcactaactgggataataaaaatggatattctttgctggaaaccaatttacacgcttgcctgaaaagttcatccaacattttttatgtcggtggaaataatcatttcctttcatttaatccccaattaattagacgaaatacatttatacctcccgtatatattacaaaaatgagaatttgggcagattatctggaagataataaagctacccaatgggtaaatatctcaaatcagagaatcaaattaagatacaaccaaacctcattcacaatcaaattctccgcacttagttatgtgtttgcctccaacaataaattttcctatatgcttgaaggatttgataagggttggtcggaaccgacacacgaacggagtgttaactatactaatatcccgccgggtaagtatgtttttaaagtaagagcttgcaataatgacgatatatggagcaatggaaatgcttcattatcaattacagtcactcctcctctatggaaaacatggtatgcgtatttgttctatctagcattcactattagcatgattatgctgttcatacgttataaaacccgggaagcacaactgaaaatggatcttcagttaaaacagatggagaaacagaatattgaaatcagtcacaatatgggtgtacagatgttcaccaatttctcacatgagctacgtactccgctcactttaatcatagctccgctcacagacctgttgcataaagaagatatgcctccggcatatcgccaaccattggagctgatcaaccgtaattcccaacgtttattatggctgctaaaccgtttaatggactttcacaagctggaagctgggaaaatgcaacttcacgtcagcaattacaatctaggtacttacatacctgaaatcatcaaactatttatgcctgttgccgaaaagaaaaacatatctatcgaatttaatgatacgacctcctcaacagacacttggtttgatgccattctattggaaaaggttttctttaacctgctctccaactctttaaagcatactcccaacggtggatatattatcatctcaagtatggaaaccaatactgaagatattcagaagcctgaaaatctgggtctccccgcaggaaagattcttttgattaaagtagaagatagcggctccggaatccctgccaatatgatgccccgtatattcgaagctttcttccaggcaggtgagaaagtgctgggaagcggaattgggctgaatctgacaaaaagtatcattgagctccatggcggacgtatttggatagataataaagaagggcatggaatgaccgtgtctttcaccctcccattaggtaaagacagttataccgaaaaccaactacttagcaaagacaagatagtaaaatccacccatacttattctgatgtagaagcacttattgcaacagatgtcaatccctgcgagatatctcagactaatacttcacccaaggaaatgactctgctcataatagaagacaatgaggatgtacgtaattacctggtatcattgctcagcaaatactataatatctatactgccgtaaattgtaaagaaggctatgaaatagaacaaaaacaaatacctgatttggtgattagtgacattatgactccatatatggacggtattgagtttacaagattatctaaaaacaatatggtaacttcacatattccgatcatattgctcacagcccgtgtcacttcatcgcaagtgcgcgaaggctatgaatcgttagctgacgattatatcatgaaaccattcgatccggaattgttggttgtacgtgttgccaacctgttgattaatcggaaaaaactcgcagaacgatatggaacggaaatggtatcaatcaacagagagccacagaaagctaaagaaacttctgtttatagtgccatggaagaaaagtttatgaaaaaagtaatggaaataataaacaaaaacatagaaaaccctgcctactccattgatcagttcagtgaagaaatcggtatgagccgcgtacaggtatatcgcaagatcaaagccgtaacaggtatgtcgcccagtaaactcatccttgacatacggttgaaaacttcactagatatgcttcaaaacacagaatatacagtgaccgaagtttcttatcgatgcggttttaatgaaatatcttatttcggaaaatgcttcaaaacagaatacggcttatctccttccgaatatataaagaagtacaggaaataacagagttattatcaaaaagaagtgccgctatcgtaagacatagcggcacttcttttttagaacctcaccttcttttaaggttgctgataagatcctgaatacaaatattcaatggaaggcaacggtacatacatagtactgtaaggcggattcattgcaggaatcggatccccatcagtattcggattatcataaacagctcccggatttctcttttgcccatcaattgtcttctgcatagctactaaataaagcaagcggtctccattctcaaaaccaaactctttgattctttctttttctatatctgcttcagttacattcttcaaaggagtcaatccggcacgttgacgaatcttattcacatctcctaaagcttgagatgcattcttagaaaggactaaggtcgcacgcgtcagatatgcttccgccaaacgaatcaacggtacttgggaatacttcccatacggagcccgataatacttatcattccaaaaagcattccattttgtcttgttatatgccatttcatgtatggttttatctcctccatccgtatagtttttcaggaaataatgcagttgagtaaatctcttatcagccaaggcttctgcactcggaacataattcgtcaaatccataggatcatctgttaccgcccagccaatatacttaattaaacgaggattccagtaagcacaagcccaaccaccatgttgccaattctgactgccacgcgctccttccaaccataatttattactagcatcaaatgtctttgacttgaaattataaataccagttttacacatacgagctaacggaatagctacgttatttccctgattgctttcagtgaacgcacactcaaacataacttcctttgatactgggtctactgtatattgttgttcggcattccggttaaaagcaacaatcggttcttctgtcaaatcaaaaggtgctactccggcttccgctttagtaatcacataatcagcttcttccaatgctccgtctttatctcccattaaccattttacacgcatcaacatcatagcagctgaaaatttattggcacgaccacgcacaaaataatcttcaggcatcagacttttagctttagcaaaatcagacaacatctgatcatacacttctttcacagtccccatataaggattgcgtgcagactcttgtgaataatcaagcctattgattaacggaatgaacttacgattattcccctctccacctgccgggtcgtaaggagcaacaaaagctcggctaatcagccaataggtataccctctcataaaatatagttctccggtctgacgtgccaacgtcttcttatcattttcagtcatattggcaaaaactggctctccttttttctccttctcctcaatataagtcaacggagaagtagctcctgttacagaacgatataatattgaaaaggtcttctcaaattgttgtcctgttacatcaaaggtagacatctgacgaggataccagtaaagtgcttcctgctcataagccccttgcggattaaccgtagacaaatctgccaccaattcctgataataagggataataccgataggtgcctgccaattaggattctgaaaaagagtattataaggatcagcaacagaatattccaaatcatcaaccgataaccaaggattagattccggacgatccagttcaaaaaatttatccatatcacaggaagcaagaagtgcaataccggataaggctatcattatattttttatcgctttcatactatcaaatatttaattaaaatttaaagttaatacctgcggagaatatacgggtctgcggcatttcactaccggagaatacagctccctgcgcattggcacctgtttggttctttactcttacttcagggtcatagccgttaaatgaagtaatggtgaaaaggttgacagctgagacatacactcttaaagcatcaatatttattttcgagcagattctttgtggaagtgtatatcctaaagtcaaattacgcaaacgtaaataagcacttttctccagatacttggtgtgaccggcatcatgttttatataagttacattttgcttgtcatttccattgtcatcataattatatttatcttgccaacgaagttgcggatactctgcaatatctcccggtttcttccatgagttctcataaatatcagcagtcacattattacgtccatctcctacaaatgattttgtatatctatgataattaaaggtataactacctaatgagagatagaacataaatgataaatcgaatgccttatatttaaagttatttgtccagcccatataaactttcggaagagccgttttaccttcttgaattatacgatgtttatttacgtttgattgagtagcgggaatcaatcttccggttttcactgtctcaccggtcttattgtaacggtcaagatctatttcataaatcatgccgatacctttctccggatcaactcctgcccattcagccataaaataagtacccaaagccagatctttcttcgtgatcgctcccggacgtgtattgatgataccggttccttttgcatcaacactcgcatcaagtgctgtcactttattcatatttgtcgtcaaattatagttcatgttccattcaaagtctttcttgaccaaagtaacattaatgtcaaattcaaatccctgattatacatcgaaccaacatttgcccacatagaattattgtcagcattaccgccactattggtgataccggcagatgcgggtaattgcacacgcatcaacatgtcacttgtcgtacgacgataataagcaatagaaccatttactttattattgaacagcgcataatcaagtcccaagtcaatacttttgtttttctcccatttagctgctttattagcaatattccataagaacatattctgcatattattgtaatattgcttgctctttatactatacgaattcttcgtcacttccgaaggaatgttctgattacctgtttctccatagctgccacgtaacttcaacaatgaaataaaaccggcattacgcataaaagcctcatcagaaataatccaaccacctgatactgaatagaagtctccaaaacggttttctttcacaaacttagatgatccttcgcgtacaaaagatgctccaagtaaataacgttgcttgaacttatagtcgatacggttaaagaaactgaatgtgtaactctcaccacctatataagcactgttattccccagcattgtaccaataatcttgggttcctgaaactcaccactcaagttcttaccggcaacaacagcattatccgtataactcctatttgcttcaatacccgttacaatatccagaccatgatctgtccattcacggttatatttggcaaaagcatgatattgttgggacttagtcgttttcttgcttttattaccttggttaccatctacattgccagtattcgtaatcaagccggacaaccaataatcactttgcgccaatccatacccataacttgcatctgcacgaactgagagcccttttatccacttcaggttaacatccatatataatgttgtgcggaaactaaaattctcacctgtactcaactgataatcgttgtcaagagtagctgtcggatgaccatccgccatttgtggattccaataccctgtagggtcttccggatcatacactttgcgccacggaaacttatcagaaactaccgcccatttattcgtcgattttttacggtcgaacttcagaaaagactgagttcccaaagtcacaattcctttcttaaattcactattcaaacgtgcactgaccgcattcatgctaagccctttcaaactggactcatcagaacggtaattaacagacgcgtaagtcgttgagttctctcccccttggttcaaggccacgtttatatcatggaaatgtcccatacgagtcaccaaatcgacccaatccatatccgtattcatagcttcctcacgagttatcggagaagtccaattggaataatacggttcgataatatctttctgtgggtcaagcggatttaatcccacattagcacgagcctcatccattatattaaagtatgtcttcgtactggccaatcctaaatctgaattagtgataggagtaataccaccttcataatgaacgtcgaatttaagtcctcccttttttcccttcttcgttgtaacaatgatcacaccgttcgcacctcgggaaccataaattgcagttgcagcagcatctttcaatacttctattgattcaatatcattggagttcaccatcgtagaacctccacctacaataccgtcaaccacccaaagcggatcactccccgatgcaatagaaccgataccgcgaatctttatctgtggagtactacccggcataccgtcattcacaacttgtacaccggaagccagcccctgcaaagaattctcaaaacgcccaccttgcatcagcgacatttcatcacttttaattttagaaacagaccctatcatatcacggcgtttcttagttccataggcaatcaccaccacatcatcaatcaccacagagttttctgtcaatgtaacatcgataacccgacgttttcccggaacaatttcctgattatcaaaccccatataactaaatcgaagaggagaagagtctttctgaacaacaatactataccgaccattcatatcagtaacagtaccattcgttgtaccttgttctaaaaccgaaacacctacaagaggctctcctttggggtcaactaccttaccagtaattgttgcattctgtccccaaacagacaacatcggtaaaataagtccaatcatcagcaccaacaggaaccgagatcgtaatccaatacgtgtaaatgaattcataataattaaaaatttaataaaggttacttagtgttgtttaactacggatgcaaaattaggcattagacagcacggcaattaatactcatgcttcaaaatatatgagaataacatcttcataacaacactggttacatttatataatacatgttacatgatacgcaaattcgaatgatttatgtcagtctcaaccgtcatgtttttcatattttctgcaatgatataaaatacttcgaataactcatgaaacaaatctcatatattttgaaatgccattattaaaaagattggctaaatcacggtacttttgcacttgttctattttcaacaatcaatataatacaatgaaacatttactgatcttattattagcctgtactttttcctttcccagccgggggcaaagtattatccagctttccccactccaaggagagaggggcatacaagcagccatcgaaaaagcatctatgaacggaagctccattttacttcatgacggagactatatccttcataaaagcatagatataaaaaactgcaagaaagggataataataaaaggtaaaaatccgggaaaggtacagttgcggtgtgataaacccttgaaaggaaaactgagacctgtcaaagatactcaaacaaaaaacagagttcacccgaatgctcaaggtattattatggagatagacttatcggaaataggtatcaatgttcctttttttcccgatttaatgaaagagcgtaagaactttccacaactcatttacaacaatgagctactccctctttcgcgttaccccaacaaaggttatctatatatgaaaagggtattggacaatttcggaacaaacgaacaaggaggtacttttgaatatagtgatccagaacacggcaaatgggtgaatgccgtcaaaaacggtctatggtttacaggatactggcgtatcccctggcaggcctggactgtacgtataaaggaaatagacccgaacaaacaaactgtcactcacagcgtagggatagaaacaaaggaaggaaaagatgtaggcatatttggcggcatcggttccaaatatcatcgtccgtacggttcgggaaaagaagaatattatgtagagaatcttctcgaagaaatagatcatccaggagaatggtgcattgattttacaactcaaaaattatatcttttccctcccgaacattttgatgaaaacttattgagtattgtatcagacactaccccattgattaacattataaattcaaatcatataaaaatagaaaatatctccttcaaaaatcatttaggcgatggcgtcatcataaaaaatgccacagaatgtctgattgccggatgtaacttcaaaaatatattaggagacgcattaatcattcagggaggaaaacaaaatagaatacaaagcaacaactttgaatatatcggtcgcacctgtattgaggtatcaggaggtgaccgaaaaaatctgattgcttgcaaacacttaatagagaacaattattttacccgttttggtgaaatacagcgcaattatgctcctgctgtaaaactgggaacctttactacaggaatcggcataaaagaaggcaatgcagtgggaattaccgtccggcacaatatggtacacaacgctccccatgcagcctttatctatggaggaaacaacaacatcctagaatataatgaagtgttcgacatagctcgggtcacaggtgatgtcggagccttttatagtcgttgggactggacttcacgaggcaacgtcttacgccacaattttattcatcattcaccacgagctaatgcattgtatgcagatgatggacatgcgggggactcaatttataaaaacatagtccatcaagtcgtttccggtaccattataggtggaggccactgcaattacgttcacgataatctatattttgattgtagtgcagcaggcataagtattgatgcccgtggaaaaaaacgaaattataatgcacaaaatcctgaattcacccatttgttcgatgttttccggattaacaaaggcaactgggacaacatctacccaggcataagtacatttttacagaccgaccatctggaattacccattaataacagcatagcagataacacatttatcaactgccgttgcggattacgaaaagaagggaaagatgaagattttcaatattcatacttcggcagtaatacagacttggttattcccaacttaaatttccgggaaatatctattctaaaaagtctgaaaaatattctgggagttagctctataacagaataccaattagagaaatgcggactatatatagataaatatcgcacttccttaccggatagagtacaattaatcaattctataaaacaacaacaaaagggttttgattctatcgaagatcaacaagttactaataacaatcaataatattatcatgagaaaacacctatttccagtccttttgctagcgaacacactgtggagttgcctgtttgctcaaactcctattgttatggatatggttcatcataatccgggtgaacctttcacaaacacatggttcaatgaacctgggaatttagtgcaatatggttttaacgcgcaagtagttaatgaatttcaatctgtacatacagccataacatatagcagtttagacccgagaatatgtcctaccggttctaaagaacgtttatggatcgattctgttgccacccgtatagaaaacaagattgaagctatccataaagccggattggaagcatattactttactgatatcatcgtacttcccaaacgcctggtggaaatttataaaaatgaaatttgtgacgcgacaggacgaattgacttcactcgccccaaaacacaagagatacaccgaatcatgcttcaagaaatatttaaacgtttcccgaaacttgacggtctggttattcgcgtaggagaaacttacttgcaaaatactccttaccacacaggtaatggtcccatacccagaaacgaaaaatcatgggaacataattctgcttataaaaccgatggaggagaaaaaatacacagtaatctaataaatctgctgagagaagaagtatgcatacgtcaaaataaaaaaatcttctatcgcacatgggatttcggttacttccatatcaatccccaatattacctttccgtaacaaacaacgttgaacctcaccccaatctatatctatgcataaaacacgtacagggggattatcaccgaacgtataaattcaaccctacattaggaataggtaagcacaaacaaattgtagaaattgaatgtcaacgcgaatatgaaggcaaaggagcatacccgaactatattgcagacggtgtacttaatggatttgaagaattaaaatcagattcccagccttactgtttgaaccagttaaaatcaaatcccaattttgccggtatttggacatggtcaagaggaggaggctggagaggtccctatatcaaaaatgaattatggtgtgacataaacgttgcaatattggccaattgggcaaaccggatgtcgttaccggaaaaggaattatttaagaaatacgccatagccaacggattcaaaggaaaagacatcgaacgttttcatcgtctttctcttttgtctgctgacgcgattgtcagaggaagagcatctttaattctccccatcaatgtatggtggacgagagatcaattcatcggaggagagaaagaactgagacagaatctcaaaactattatagaacaaggactaactcataaaatcatactagaaaaatcccaaagtgttgctatctggaaagagattgtagcattagccgataaaatacaaacaggcaatccggaactaagacgttacttacaaacttccgccaagtacggattacttttatattcaatctatgaacagggttggatcatcatgctcaaaggctacgaaggagatatgaacggtcaatatgacacaaaaagtattcgcaaagccatcgataattatgaccggttatggaaagaatacaaactattcggagagactcatccggattgtgccacactttatgagccttatagttttgactttaacaaacctccattgtatcacgatttaaaacaaggactaaatcctactgtagataaatacagaattacagataaaccataaaaaataagaaaatatgaagaagacatttctaaccgtgctgttattctatattttcacaggaatagcagtagcacaaaacctgtcaaaaacaacagaatacaaaatcttattgacaggagcctcattcgcttctccgcaaaacggttggttcgaaatcggttgtcgcaaactgaatgccgaagccataaaccgggccataggtggagaagccatagccaatacagcaaaccgaatggccaatggtaccctctactctaaagaagaactggaaaatattgatgcattagtcattatgcaagtacacaataaagatgtttatgaagaacttcaactgaaagataaatacacggattatgaagtaccatttgatcgcagcaattacgcggcagcctatgattatgtcatcaaacgttacctcacggaatgctatgaattacgtaacgatactacatccaaatactataatactccttatggtaaacctgcaattattgtattatgtacacactggcatgattgtcgcaccgtttacaatgaaagtatcagaaaactcgccgctaaatggggatttcctttaattgaatttgataaatatatcggattctcaaaaaatgtattacatcctgtcacaggaaaacctttcagccaattatattccacggatattcaagttacagaaggcatagcttatggacatcatcccatacggggagaacaatcatatatgcaacaacgaatggcagctatttttgtagattcgatgaacagaattttacctataaagtactaagtatgaaaagaactattatatataccctctttctcctgtctttcgtttgtcaacaggcgaatgcgacacatattgttcaaaatcaatatgattcctcattgaaccaatcggaacatatgtcttggtggacacatgacaggtttggtctgtttatccactggggactttacgctatgcctgctcgccacgaatgggtaaaaagcagagaaaaaatgtccgatgaacattacaaccgttacaaaaacttatttaatcccgatttgtataatccggaagaatgggcgtatatggcaaaagcagccggagttaaatatatggttttcacgactaagcatcatgatggtttttgtatgtgggacagtaaatatacggactataaaataaccaatacaccttataaaaaggatatcttaaaaccgttagttaatgcttttcgtaacgaaggtatacgtatcggattttattattcgctattggattggcatcatcccgatttcaccattgaccgtaaccacccccaaatgccacaaaaccccgaactcttgaaagaattaaataagaaccgtaatatggcaaaatacagggaatatatgaaaaaccaattaaccgaattgctcactgaatttggacaaattgatgaacttttcatggattatacgtatgctgaaggagagaatggaaagaatagtaaagactgggatgcagaaggtattgtcaaattagcacgaaaattgcaaccacagattattataaacaaccgcctcggactaacagaaaatagacaaggctgggattacatcactccagaacaattcatgccacaacagtggcccacagtaaacagccaacgagttccttgggaaacctgtcaaacattctccggttcatggggctaccatcgtgatgaatacagttggaaaagtgtacatcaaataattgttatgttagccgaaactgtcagtaagggtggaaatctattactaaacgtcgggccaacagcaagaggtgtttttgacgaacgtgctatagaacgtttaaacggcctggcacattggatgcgttttcatagtagcgccatttatggatgtactgccgcaccaactgaatatgcttgtcccaacaattgtattctcacatataaccccaatactaaccgactgtatatacacgtgttagaatggccattcaaatccttatatctaaaacaatataaaggaaaaatcaaatatgctcaattattgaatgacaattcagaactcaaatttcggactgaaaccaaaaaaggaagccatatgaccgaaaatacaggagctgatgatgttatcatcactttacctgtagaacgcccaaatgtcgagttaccggttatagaacttatattggagtagtcaacagcaacggaagattccaactagatgttgaacttctgatcgaagaacatgagctgaagtttgattacactattcaatcgcttcaaataaagataagtcactatttcgattccataacttatgaattgcttttcctgatatgcaatgaagcggaacaagtcctctttgccggctatctaaagaattatacctgaaatctcccatgacgaaataacaatcctcttttataatgataggaccaaaattatcatgagaagcaattcgtttacctttttcctcaatagccttattattaatatatacgatcccatctttaagctgtattgtgtctttcggcatccctataattcgtttaacgtataactgcgtttcattttcatcccacttgaatataacaacgtccatacgctgcggagaagagtatccccacacacgatgatacccccaatttgtttttttatcagctttggctacggctggtatcagacagagtaaattgagtacaggtgtttctacaattcgctgaggcattaaagccccgtatgtaattttcgagttccagaccagactttttgcacttatcgtaggaaacatactatcagacggaatatatacccattcgccaatgaataccttaaccaaaagcaatataagtaacatacaagtccccagtttggctaacgtctgaaatttgatacgtttcatttcaattcctcagtagataaagactgtaaagcaacaccatgtgtctgaacccatctcgccatgaacgcaaatgtggtctgcgtttccgaccatcgggatagagaatcaccgggatttcacaaatacgcatctgatgaatagaagccaaggcaacaagctcagaagcaaactccataccattacactgcgggttaataatgttatagcattttttcgtgaaagctctcagaccacaatggaagtctccaatattattcttaaataaaaaacgccccaaggacgacaagaacggattgccgacatagcgatgaagccatggcatagcccctttcgtgattccacctgcaaagcggtttcccattaccatatcataaccagcctgtaatcgttcgataaataatgataattcaagaaagttataactatcatcagcatcacccataatgatatatttcccattgcaatgttcgatgccatgtctcaaagcactgccatatcctttctgacttacctgtatcacatccgcccgattattcttagcaacgagagcggaattgtctgtactaccgttatcggcgactataatttcataagttaatccggtgtttgaaaaaaattgatggattttccggatacatatgcctaatgtcttttcttcattgaggcaaggcaaaatgatagaatattcaatgtctgtggttttcatggtgttagtattttatatattgcgaaatcttgattacaaaatacttgttgaaaacggttatggttcaatctgatcaccccatgagggtattgaagataggaaccacgatacaaaaactcgacataccagttgacgttggcaggaagattggatatctctcccgaaatattgcaggaaagacgattcgtatataaatagatagagcgactttctccgcaggctacccaatcgtcctgagcggtattcatacggaggaaggcgtacatttcttgagcactctcgccttccacgttcggatttatggtagtataaatccgtatggatgaggtcgcatattttattgaagctttccaaacagaacagattagtatgcctataattggatagagaacccattttcccgcttttttgccccacaccatacacataaatcggaatccttgaatgaagaatatgaaacataatggaaaaaggggaagccaataccttattacatcataaggccaacagattaagagcattatggtagaaaccagataaactgactccgccgttaatttccggctacttatgtataagccgagcaagcaattcacccaaaagaaaagattgaagagtgaaaaaggaatatataagatctgagcaggatattcgtaaaatgtttggatgttgtgaagtaggtttgtcagagtcaccaccttaaagtgctcaaaatgttctgtatatcccgaaggaaaaacaagagtaaagacaaaccaaatgcatagagcagatgcataaggaaggaaaaacctccatcctgataatctgtttttccattgaagtacgattaaggaaataaataagaagtatccttccgtacgaatctgtgccgtgaaaaaaagaagaatacctaaaccgatgtatagtatagttcgcttttcggtctgttccttcaatgcatagagtttgttcattgtccaaaaagagaacatgaggaagcagaaaaagggaagttcgctgctgacggagttaacatacccccaatagaatatgttgcctgtcagcaaagctaaaacgagtaggacggacattctgaaacgctctttcgagagaatagggtgataatagagaaagatgaaagcccctaccagacagataactcctacaattttgaaggcaaaatagttgatgccaaacaatgccacacacggaaatagtagcagaggatatccccacgggtaaagtataggcgaatagcgctgataagtagaatgggttatcatctcctgcatgtccgaaaacacttgctgcatatctccgtattgtatgctttgtgcctgtcggatataaagtgcaaagtcaccgttgaatatatgccccgacactattaattgcacggctccccatagggtgccgcacaataatagcataaaacatagttcagtaatatgttttttcaggaactgcatgagtcattatttgcatctaatagacagaactatagagctttctcttctacaaatttaaagtcatatcccggttcgttgtcttccttcgtcaaaggagtaatctttccctctacaatcatagattccgaagatcccaaactggggagttgaacgagtttataccccgctgccgcttcctttataagttcaagatacttgtctgtacaaataatcagtgtattttccggattgtataacatcggagttttctgcaataattcttccaaccgaataagtgctttgagattagcctttggacttattgagatagtatggatataagccggtttccatatttcttttaaactctcagcttttataagcgattttttatcagatgtgcaaataacaaccttagtcatatttgttatctgaggatcaggctcttgcgaataggcaaaacccaatgtcatgcaaaacaagcataacaataaaattcttttcttcataattctaaatttttaattggtttgaaaatatcgttgacttatgtttttaagataattgtttgccaaatcaggaacagctttgtcgggtatgaaagcatgtaagattgtcatgtcacttgataacaaaaagcaatatggaaaaccttcttcttccaatgggagagataaatttccattttctatatcaaatacagtagaaggtaatttcatgtttttctctaaatatctacgagctgttgacgattggtaacttccaataagcaaaatattctcgtcaagatttaattctttagataaacgccctattttttgaagtatgaaattgacgcaatcactgcaatataattcgttgactcttactactaacacttcttttctccctttcatatattcctcaagcggaattgtgacaccattgtattcttttaataagatatttggcatcttcattccattcaccgagaaagcaatttgagaatttacccatagtgccatttctttttgtccggtaatggatttatcagtaatctgttcctgacaatacgtctttagggtcttatacttctttaaagtgaccatattgacacctagtaataatagtactaatatgccaacaatatatatgttgatattctttttcatcctgttacatttaaatagatttaatatgtaggaggaataagacaggattactatcttccgttaatccatcatataactgcattaacttgctatcgttaattaatggcgaattataaattcgctctttcatacgcataacagtagtggcagattgcggaataagaaaagtttctttgtcataacaaactatgggtgtatttcctggagaatgtgcaaaaaataaaggattgtaatatctgccattacacttataagtctttttcgttttatgagaataaataacgaaaggagaccaagtgaatccatttttgctaaaatagaacaatgcatagtcctctaatataacatagtctgccatatgaacttttgttccgactatttttatatatgtatcactgttcatgtcctctggtctttctggatatccaccattagttatatttattctatatttctcgtaacaacgatctttctctatcttataaatattatgcgtccatggctcttttaaataaatgtcatttccaaaactacgtaaaggatgcattccattgtttaagtgaaatacctcgttataaaaacttgggaattctctataaagtagtttgaaatctttgtcataaacagatagcatttgccgttgagaatcatcgtccataccagcttctataaacccagcaataaaatcattattaatcaattcaatatcatttgcataaaagctaggagatacatcttttatatgcttcccattcaaatcgtaataatgaagacgattccagtcatacaaaactatttgtttttgatcgcttgttagacacattttgcataaacgcgagtattcaccaggaccttgtcctacttttccgattctccgaacgaaattgccgtgtttatcaaagcaatatacagcatttgcaacaaaaacatccattatgaaaatatactcattagagcaaagtatctgatgtatgtttcctattaaacagtcgctgtttgtttccaatttgatgtatgatatatcatcgatcaagctgtcgaaagcataggattcttctccatccggatcaacatttatttgaataagagttgaatcggaaataatatgctcgcctgttgaaactttattttggggtgtctgacagccaatgtttatgaagagaatgattactgtaacaatgttacaacaaagtgtgaataattttgataatgacttatagtttatcatacaatatatatttaaaaaaattatatactaagtccatagcattaggaatccatgaacttagcatttttaatcattactgacggcaaggatcagtaatactacaaacttcaacgtaatttgtggctggaccacagtaatactttttagcattaaattcttgtactacagtttcagtagtggttgttgatgaaccagatgaagagtttgagccccatgaatgatcacctccaatagaaccacctatgattccattacctacactaataccaccattgatattagtatcggttctagtacccgttgtgacagatgaagaactcgaggtggtggttgtttttgtgcatttcacatctgtctctaattgttttcccatgttagttgtagttccggatgtcgtccccgtctgcgccatcacctgcggatgcagtgatatctccattactccgaactcattaagcgcgtcatgcacgtttaagatagttcctaccattagtaaagccattccggctaatactacgattttgttctttttcattgtttctcgtgtttaaaattaatactaaggttagtttctcttttctttaaaacttctttaaagtgttctttcaaagtatctgagttcttccatgcaggagcataaccggcagtgtaaacgcataggtatgagcaatataggaatccggcatatagaatccactttctttggcgttcgtatagatgatatgacaatatggaaagcccaattgcaaacgcaatatacggtatatacagatagcggtcagctgcaacaacgtagcggggtagcggaatcacatgaagcaccggcaacagatgtaatatgaaaaacagcgtgcaaaagaccaataatggctttctgcggttcaggtatatcacatatcctatgaataggataacaaatgggtatatccataaagccatgggtatcttttcgcctacctgaaaggggaaaggataaagataggaaagcttgaaaggaatagccgaaatcaagagatacttaaatgatgaatagcaaaggaatataaaacggtctactatcgtatatcctatgatttcttctcctgtatttttgttggccacaagggtaactataaaaatggcaatagcaggaatgagataatatactttttcgatatacactttcaaggaacgcatatttcttttgaacagcatccagtcgaacagcaacaagcatggaactataataacggactgttctttgcagcccatagccaatatactactgaccccactcgctagaagatactgccatttactattgcgcatatattgtatgtagcatatcagtgccgacaaatagaaaaaagtgctaagcactatcttcgacgcactaatccagcaaacggtttctacctgaaccgggtgtatggcaaataacagtgcggtgaagaaggatatacccaatgcctttttagaatcaaaatgatttcttataaaagaataggccaataagtacactaaacaggcattaaatatatgaaacagcaaattacctatatgaaaggctaaactactgtagccgaagcatagatgaataagcgtgtagtataattgattgattggggagtattgaccgttactaatactgtggaatatagtctgcaaattcttcaatgatatcccgtcgttcgtcatcgaattaatcacttgccactgatcatcccaatacaattgaaattcgtgcgaaaatatactataatatatcaatacagcaacaacagcaataacactccaatgtgagacaatcgttttggcaaatgttgatgtattcatagcattaatatatttgttattgtgagacaaagatagtctggattataatatcatgcaattattggaggaggacaaaatatgtaaattatctatacatgtactttattgattatctgtacgtttaattcttatttatcttcgttgaattgagatttaggtagacagatagtagaatttcttctcctaatttcaacttgttttttatcctgtttttataccttttgattgtatttgtctcaataatcaggactttcgcttgttcagagatggtgattcctatataagtaagataacaaaccttcacctcttgagaggttaggccaaaggaagaaactatatggctaatatctccatataatatattgatagcatcgtaaagcaacagccagtcttcctctttcttgatgtgattatatcgatgtttcttcaaaagcaacaatgactctaaaccaactgtcaataataattctttttcagttaattcacttttaagagataactgcaatctgagtttagctttcagctctcgattacgctggattaaatctaggttcagctcatctttgtatttcaacctctccttcaattcagatactactttttctaactgaatatcatccttttttagtttatccattttcatgacgagtgttttttatttgtatccagatttaatgcttctctataatataaatacaccgcaggagcgtctgtccccacacccctaggtatattttaacatttcgttccttcctcatatcaaaaggaactttgaaaacacgccccatattccactttaccgagcagcgtatcgaagtcttctgctgcttcatcgcctataaaacagcagaagacagattaaaataacaaaacgctttcaccggtatccaaccattccgacatcaaacgatagtatgccggatattcggccggagttatcaattgctttttcagtttcaaagtacggacaatctttatctcctttgccgcttttttcactgtaactcctacggtacctaccggattatcaatcttcttatcagtcggcagcactaccggcctcattccgtcagcaactttcacaatacaagtataagtttcatcaggtaaatatctcaataacagattaaccgggcgagtcgtatttacaactgttgaacgtccttcataagcagcccagccattccgcgcctgtggcagttcaaatttccggtaacctgcttccaaagcttttccggcttctgccgtcactcgtaatgtggcggtttgcgaaataacatgggaaactccttccaaagtcaccggccgggcgtccatgttgacaacagatacaaaatcctgtatatcggcaatagcattatcagcaacaaacagtctgctgacagcagcgagtcctgccgcatccttatcttctgttttaggaaagacagcctttacttcggcctgaatgccgcttgcctgttgcaaagcagccagcaaagccgctttctccgcttccgttccataagccgaacgaatcacttcggcaaccggacgcaaacgatacccggtttgtgacaatgacaaacggcagtttcctaatccttgcacgtaagcagtgagttgtttcgttttttgctccgaactttgtgtattggcagtcagcctctttgccagttcagaaacttctttgtcgttactttcaaattgccgtttaatcactttcaacgcatcggcttttgaagcatacgtagaagccacaatagcctgtacgttacctgccggcaaagaaacagcaagcatactaggacgaggttgcacattcttcaacgcccaggtcacagtctttacaccacccgctgttttcaccaccggaacagcttttccattcaataactcataatgcaaaggtttgttttcgggtaccgataccgaaagcacatactccctgataggagataattcctctatctgctcgcacacatccagttcgggaagataccccggacgggtaataaccgagtaatccagataaatagtagctcccagctccaatccggtatggactacaaccatttctttcagaccattatatgccggagcatcggctgcagcagaaggaagtacctcaacaaacgcgttttcgggcgtcttaacgatattgccatctttctgacgggtatacgattcgtgaatcttcaattcctgaaactccggattgtaaacaataaaactttcgccatacagacgattcattgccgtatgggtaaacaatgtcagttccttttgtacacgcatctcctggctaccgtcagtatgcaagatgtacgttttgtgcaatttcccgaattcggcttcggataccgcttttgccggagctaccataaataagagtaccaccagcgtaactatataataatgtatatttttcattctgctctactttttaatcactaaatattcaccatacgctttgtgcgcattcacagcattacggaaactatcccaatcagcagcctcataaacacgtttcttcaaagccagtttgttgtgaagcagcactttgtttccttgctgcgccaatgaaccttcaaaatcggctcccgtaccttgcattgtctcattcttatcggcattcgccagcttgtatcctgccggaagttgaatcgtttcatccagttcaaccaaacgcgaacatccatctttaaaaccatacttacgctctttcagtgaagtatcgatacgcaaataagagcgtacctgattataaaggttattcatcaccaacggacggaagaacatctccttctcacctttcaatgcatagtccggtatttcataacggaaagtgattttaataggtgctgcctgatagtctttaggattcttgccgtagtctacgctcagcaatttagctttgggagatatggctaaaagctggctttccattgtatttttccattcgctccggaatccggtagtaaagatacggcggatattactgtcactctgcccctcggcggtaagagtgaaagtaccgcgcaaagtaccgtctgcatccaagcggttatcggctttgatacgcacataatgattttcgggagctgaaaccggagtgatacacaaatcagaaccttcgggcacacccggcagatagttctgctgctgttcggcactgctccatagttcgcgacagaaaggaacccaggtaggatcgagtggcatgtatgttccgttgctcaacttcaccactgccacacagtgattaaaatggtcggcaggaatgctttccacacggctacccgccattgtcatagccggataggcttcgaaaccggccatgcgcaggaaagaaatcagtgtacccgctatgtctttacagactccgcaacggtcggtatagttcatcttggtattgtgaagtgtaaagccctctccttttcccatggatataccggcataacggatattatcagccacccaatgagtcagcacggcaatcttttccatttcggtcttcttgccttttatcagttcatccacttttttctgcgcttcgggcagtggggcaaaactaccatagtcttcattcactttgttgaaccacaaagatttgtctttccattgaggagtggaagacatcatcaatttgggggctgcatcgaaaagatccaccatattcggctctctgccgaaaggcattacattatccatggcaaaagtgtataccttgctattattttcataacgcatggacgaagcacattccccctgatagaactggaattgcagttctttctccataggaacagctactttataaactttacgcacggtgggggcagcgctccagaaaggaacaatatcataaaattgcccgcgcataggcgggataaaacgagaatcgtcttcatcaccggctccaagcaacgcataagtgaaccccttcttggctatctcataatccacaacatcaccgggttgcaaagcgccgatttcgagcattatttgtctcgctccccagtaaatagcccgggcaggagcagtataatcacaggttttctttacatcaagttcgtcaaccttgccattggcacgatagacggttacacgcttaaactcggcataggcggtcagagggtcataatcgtatttaattacccggttagccactgcccctctcggagtctgtactttaatcactttacacacagcaaacgagccttgcccggtaggttggacagataccaacgtgctatccagcaatgtcacgtaatcggatgtttcataagtctttcccttcgcagtattttcataagatttccagctttgagcgagcgccgtagccgaagaaagaaggaaacaagctaatgtaactgatagttgttttctcatgttttttacttacattttatttataggaacaaatgtaagtaaaatctttgagtatgcgaagtttatctccgatattacttatcgcgtcatgtgtaatcagggcgttcgccgaatatcacatccagcagaaacagaaattaactcgtgcgtagtgtattcccctgaatctttcccaatatcttgggaaattgccaaaagaacaacaacgtacaacatatcgccgctgtcgcgtcggatatagcttcagccgcatatacacctgtcactcccataaaatgcggcaatatcaatgccagcggaatcaacagtattgccttacgcaacaaagcaatgaaaatagaaatccgagcctgtcctaacgctacaaacatattctggcaggcacgctgcaatccgaaaatagtcataccgcccaaaaatacaggcatcgtccaacggactgtttcaatcagtctttcgtcactcgtaaacgcggaagctaccgttgaaggaaacagaatcatgaaaagcattaataacaggttgaaagagaacatggttatcagcacaatacggaagcattcttttacacgctgcttatcgccgtgcccatagttatagcttattatcggaacaaatccctgtgcgaatccggtcagtggtacactggcaaactgcatcgcactctgcagaattgtcaatgcactgatgtagatgtctccgaactctttcaggctgctattaagcacaaacccgaccaagctctccgtgctcgccataatgaacggagaaactcccaaagccaatatggaaaggattatttttctgtccagtttcatataaggtttctccaaaggcagagaggcgcgtttggaaaaaaggaaagtcagtacccaggccgcactgcaagcctgtgaaagcactgtggccaaagctgctcctttcacacccatattaaacccaaagatgaagatagggtcaaggataatattcagcaaagcaccgatcagaacggaaaacatagcaatggcaggacgcccttgtgcattaataaagctgttcagtcctgtcgatatttctacaaatatagtacccagcagataaatggaaagataatccacggcatactccaatgtattcgccgaagctcccgtgaaaaggagaatgggttccataaatgtatatgcgataaaagacgtaagcaaggtaaataatatcagaaggacgaaaccatttcccaatattttaccggcacgcaaacgatctccctgcccgagcgcaatggcggctaacggcgcaccaccgccaccgacaatcgcagaaaaagaggaaatcaaaataatgagggaagtagtcactccgacaccggcaagcgcatcggttccgatgcccggaatatgtccgatatatacacgatcgacaatgctataaagcagattgacaaactgcgcagctactgcgggaagtgccattttaaagatgagcggcaacatacgttccgtccccagccgttcttcgtatttatttatcattctacgcttctttttcttaaattggctgcaaagttacaagaaaaacaagcttcccggtttaaagtagaaggataaaatactttttgcactctatcgattcttttttgtattcaaaatgagctaaaatatctgcccgagaagctgtaccataaagctgaaaagtatagcatcgatctaccacccgcaacagatattatatggctgtcggcatagctacggaaagttattcctactcactaagaaatacaaagccataagtttcttggcgtttccatagttagaaacttcagtttcaacgcttagaaactttagtttccatacgcagaaactctagtttccctatagagaaactccagtttccagccttgaaaaccgagtttcaacgtttggaaacattttctcatccatagacttatgtctattataactgtttaataagttttttctgataagcaatacgttctgttccgttcttcacataaataatgccgcagcgctgaaagccgtattttgtcagaatatgctgcatcactttattgtcctgatgtgtatcgacacgaatattgccccattgttcaaaacaccagttcaggcaggcatctgatactcctttccgtttaccgtttgttgctaaacggtggatcacgccatacggttcgtcattgagccagttcccttcataaatatgctggtaggtaggatcttcacctaaaataaaacaaaaagttcccaagatttccccctgaccgtccatacagacaaagctatggccgtcttctatttcctgacgaatcaacgcttcggacggatagccgccaatccattgagttacatttccgtttgtacgcataaaggcacgggcataatcatatatctccatgactctaggaagatcttttagttcggtagctctgattttcatcacttaaaaaagttatttaaaagaatacgataagtcagcaatagaattattcgttgattgctccgcaatgggggcagacacctttttctttcaacttctccccgcaatgcccgcaacaatatttataacgactattccaatatactttctttacaaaaacaagaataaaaaggatgaggaataaataacctatgtatatatgcgccattaaaataaagaagaaatagcagaatatacaacaggacatcagtcccagcagataaaagattgccgctgcgggggtcaactgccggaataaatcgtcaagcactgccagggagactatcacgaacagccagatactcaacaaaaagactgaaagaataaaaggaactttaaaaggcgacaaagtaggattgaaatagaaatgctcccatgtgtccggcacaaacacctgcattgattcataaaccgttgcactgaaggccattaacagacacaggaataacggataaacactgtcaatatcattgaaatacaccatttgcaactgcttccgacggaaggcacgaagcagatagacaccgacaaaaagtgcaaagataaccacaaaataggaggcgtacgtatcactaaacaaatgaatggcctgagaaatactatccgtagggacaaaagatcgtttcaactccacctcgcgtatccacccctgttcatcctgcgtatgtgccagcttcacccaaacgctatctacactatcggcaggatgtacggcaaactcggccactaccacacgatctccccgataaagatttatgtacgtatccttgataggcaggcactccagcaaaatggaatctgccgttaactccagattcgtattccatgtatagtgccgttcataaaggtaattcaaagagtccttcgttttctgcggcatttcttcggaagaaagattggggcgggcataatggcaggacgaaagaaaaaacaagcacaacagcaaactcaccacagaggacacggaggatacagagaaaagtgtctccttccacaagccattccaacaggcagttacaaaagaaagggcagaagctccatatcctctgtgtcgtctgtaacgaatcattctgcggtggttcattctcattgcgctgcttttactttcatttgacaattcttgcaatcgaactcaagacggaaccgctttccgtcattcgacaccaggaaatagggttctctataaggcgaccgcacgcgttgatgaatgggacaccaacccatactataccgcaaacaatgtttgcagaacatcagtaccgcatcttccacccgttctttttcataagccccggcaatctgttgtacgccatgttcctgataaaaagaggcggtacgggtattcatcacatttcccaaatacgtcaatgcggtttgcggaaaagcatggttggtcggtttccatacggcgcgttcctgatgataattaatccggcgggcagctatcagtttttccactgcctgacgacggaaatctgccaatacggaagacggcaggaaccagttatctgcaaaggagatttctatcttctccgcttcgaaaggcgtattgcccagtttggcaagctgagtcctcaaatgatccgtttgcggcgtccgtgccagttccttttcacggggaagagaaagtgtcacactattatcatcttcatctgtcagtgtcagagaaaagccgaagttattatcggccagtaatatacttacggacagctttctttcggccgacttacgggaaagtatgcgttcaaattcctggtcaaagttacggtaaagtctggtgcgcggcttgatttgcggcatttcctgcggatagagcttgttgccgtcgacacgattgatacggaagccctgcaaacgcccttgctcgtcaatatagcagacaccgtcgccgttattgaatgatttcaatccggcaacagtcagatagtttccacgtgcctctttcatcgtgcccatttcttctcccaaagatttcggtgtatcgaaagagaagatttccttatcacggccatgcagaaaataatgggtaaatccccgactgaaactcttgtcgagttgcggccggaagtcaaagcggcaagtccctgaagaggcccgtacatattcctgacgacgggcaaagatagcatccagtttctgccgataagcagccgtgacgttcttcacgtaagatacatctttcaaccgaccttctatcttaaatgaggaagctcccgcatccaacaactgttccaactcatcactctggttcaagtcttttaatgagagcaggtgtttatccttgaccatcactttcccgtctgaatctaccagactgaaaggcaaacggcaaaactgcgcacactccccccggttggcgctacgcccgaaacaagcctggctgacatagcactgcccgctataactgacacaaagcgccccatgtacaaatacttccaaaggaacttccgggcaagtatcatgtatcttttttatctcacgcaacgataattcccgagccagaaccacctgacggaaaccggcctccttcaaaaacttaaccttctccggcgtgcgattatccatttgcgtactggcatgaagcggtatcggcggaagattcaactgcgtaatccccatatcctgcacaatcaatgcatccacacctatccggtacaaagcatgaatcatctcttccgtctcctgcaattcttcttctttcagaatcgtattgacagtaacataaatgcgggcattatacaaatgggcatgttttaccagtgcttcaatatcttccaaagagtttacagccgctgcacgggcaccgaatttgggtgcaccgatatatacggcgtccgccccatgatttatggcttcaattccgcactccaagttttttgcgggagccagaagttctatcttacgctgctttatcattcaatatcattaatgttgtaaggcgtttcctgataaacaaaatagttcagccagttggagaacaacaagttggcatgagcacgccaacgtaccaaggggcctttatcgggatcatcgtctacgtaataattacgaggtatttctattggcaagcctttatcccgatcacgacggtattcggtatccagtgtcagcggagaatactccgaatgtccggtcacgaaaaattcacgtccgccgcgagccattaccatatatacgcctgcatctttcgattcggaaagcaaagtcagctccggaactttcagaatatcttctctcctcacctctgtatgacggctatgcggcacatagaagcaatcgtcgaaaccacggaagatagaatggaaaggttgtagtacccggtgctcgaaaataccgaacatcttcttctccaacggatatttgggcacaccgtaatgatgatacaatccggcttgcgcagcccaacatatatataaggtggatgtgacgtgcgtacgtgcccaatcaaagatttcggtaatctcatcccaataagtcacctcctcgaaatccatctgttccacaggagcaccggtaataatcataccatcgtacttctcgtgacgcatctggtcgaaatcggtatagaacgttttcatgtgctctatcggcgtattcttggaggtatggctcttgatcttcataaaggagatctctacctgaagaggtgtattcgaaagcagccgcaccaagtctgtttctgtcgtaatcttcaacggcatcaggttcagaactacaatcctcaacggacggatgtcctgttgcgtagcacgggaagtgtcaatcacgaaaatattttcttccttcaatagctctatcgcagggagtttgtcgggtaaatttaaaggcataatcgctatatattagtaatttggctgcaaaaatacgaaaaatatagcagatattagggatgttgcttatttagaagacgtacaaattaagtcaatttaatcatagaagcataacaactaatcaataaaagccttatttttgccggagaaattagtactaataatttaaatcttagaaaaatggcttacgtaattagtgacgattgtattgcttgcggaacttgtatcgacgagtgtccggtagaagctatctctgaaggtgatatctattctatcaacccggatgtatgtactgactgtggtacttgtgcagatgtttgtccgtctgaagcaattcacccggctgaataatacaatctacaaaaagtataggctgctttccacggaaggcggccttttttattttccggcaccggatgatttacgaaataattaaataaacagggcgcgaattacataatgcaaatcgcgcccttatctttttaagctatgagtcttatttcaacttagccaacgcttctttaatacggcgaatagcttctacaatgttttcgtcacttgtagcatagctcatacggatacattcaggagcaccgaatgaagtaccgcctacacaagccacgtgagcatcttcaagcaagtacattgccaagtcgtccgaattttcaatcttacgttcaccgttgctctttccaaagaagtagctacatttcgggaacaggtaaaaagcaccttgcggcacgttcacttcaaatcccggaacttccttagccaacttcacaatcaggtcacgacgacgttcgaaagctttctgcatttctttcaccggttcctgcgtacctgtataggctgcctcagctgctttttgagatacggaacaaggacctgaagtgtattgtccctgcaacttattgcaagcttttacaatccattccggaccggcgatgaaacctattctccagcctgtcatggcataagccttggatacaccgttcacaatcactgtacgttccttcatttccgggaactgtgcaatgctctggtgtgcaccgatataattgatatgttcgtaaatctcgtcagcaagcactatcacctgaggatgttttgccaatacagcagccagtcctgccaattcttccttactatatacagaccctgtcggattcgacggagagcaaagaatcaatgcctttgtcttcggagtaatagcagcttccaattgttccggtgtaattttgaaatcctgttcgatgccggcagaaacaatcacgggagtaccttccgccagtttcaccatttcaggataactcacccaataaggagccggcacaattacttcgtcacccggattaaccagtacgaggattgcgttacaaactgattgttttgcaccattcgcacatgaaatctgagcagctgtatattccagaccgttctcttttttcagtttctcaacaatagcattgcgcaaagccggataacccggtaccggagaataacgagaaaagttatcatcaacggcttttttagcagcttccttgatgtggtcaggagtattgaaatccggttctcctacacttaagttaataacatcaacgccttgtgccttaagctcattgctcttttgcgacatggcaagcgtcgccgagggcgacaagctgttcaaacgatctgataattgattcattttgtatctattttattgttgttgagtgaaattcgctgcaaaataagcgattatatttgatatatgaaaacgaaatggcaatttacttattaaaatgtaatgtatgccccattctttctttctttgttctcaagtatcgttcattatacgggttaggaactgtttcaacaggtacattttctactatttccaatccataggcttccagccctacacgtttcaccggattatttgtcaaaagtctcatcttatgtacccccagttcgcgaagaatctgcgcacctactccataatcgcgctcatcagcaaggtgtcccaagcaaatattagcgtcaacggtatccatgccgtcttcttgaagtttataggctttcatcttttccattaaaccgataccacggccttcctggttcagataaacaacgacaccttttccttctttttcaatcatctccattgctttatgcaactgctcaccacagtcacagcgctgtgaaccgagaatatctccggtagcacaggacgaatggacacgcaccaagatcggttcatcttcattccatgtacctttaaatatagccatgtgttccaatccgttcgatttctgacggaaagggatcagacggaacgctccgtgttcggtaggcatatttacttctacccctttttctacaattgattcctgcttcagacggtaaactatcaggtcgtgaatagaaatcagtttcaatccgtgttcgtccgccattgcgcgaagttcgggaagacgggccattgtgccgtcatcgctcatgatttccattagagcacctgccggataaaggccggccaaacgtgccatgtcaaccgttgcctctgtatgcccggcacggcgaagtactcctttttcctgtgcgtacaacggattgatatgtccgggacgtccgaaagtggccggtgtagaagcaggatcagccaatgcctgaatcgtagcggcacggtcagcagcagacactcccgttgaacagccttccaacttatcaatcgtaaccgtaaaaggagttcccaatacagaagtattgtcgctcacctgatgcggcaaatccagttccttgcaacgggatactgtgacaggtgcgcaaagtactccacgtgcgtgtttcaacataaagttaactttctcgggagttattttttcagcggcaataatcaggtcaccctcattttcgcggtcttcatcatctactactataacaaacttgccttctttgaagtcagcaatcgcatcttctattctatccattttaatttcttccataacactcttatttattaattttctgtatgatgaattgaacttgttcattgttttttataatccgttccatgtctttatccagacgaatgcggaatgcccagatacggaaatagaaaaatagcccgacaggaaaaataatcccggctaccaaattcagccaatagatatggaacggacgtatatgagcagaaacgggaatgaccggataattgtttaatgctcctatcaaagtggccgacttagtgttagacatttcttccaccaatacctccagtttttcattgatagccattacctcatcatccttctcagtagacatccacaatttgaagtaattcggtgcttttgtcaaacgatttttggtaatatatgccctacactctgctgtgagcgattccaaatcaccagggatacgctcataatcaggatcatttataataacttctttcttaaatagatgacgtacactgcggattcccaaaacctttttaaaccagttaacatacgcatcggcattcaacaccacagaatccttattggatttataagtcagaaagatgcctaatggagcaagcacggcactacttgtccacatccccatccacacgatccatttaccgtcacgtgccattttatatcccgtattgtcaatgatataatagatgataaataccaataccgatacaatgacaggcattcccaagcctcccttacgaataatacctcccaacggagccccgataaagaagaacaacagacaagaaagagaaatcgttatcttcttatgccactccgtcttatgtttccggatagcgtagtcattagtctccatcgtatagctcttgaaagtcaaatcgctagccatgttttccgcacggctaacagcggaagatatcaccttttgtttttgcattaaaggcgacacttcataaagactatccacattgtattcctgaatatccgccttttctattttggcggtgtcttcttttgtcaatccgtaagacgcacggaaatttccttcggccacttccttataatactgtcttccgatactatctcctagtactttcatagagtcaatggaactttgcaattgcgccatatccttagcactggattgccgccccatgatatcaccgtcaaccatattaaaatcggagtcaaactcaataatcgtgtgcttctccctgaacgactcacggcggtaaggcacattctgagatttcatactctgtgctttcaaattctcgaataagtctccgctatatagatgcaaccaaagatgctgtttgtccgcagtcatttccagacgtccggaatctgcataaataacacgtgctttctcaaacccttctttcagatcatagataagcacatcatacaacatacccgttttccggtttttcttggcaattttcagattataatcgggaatttcggaatagaaaactccttccggaatatccaattccggagatttttgtttcatagaaagaatcagggttcccagtttggcttgggcaatgggacctaccacattctgaaaatagaaagaaacgcccaccaaaccacagacaaaaaagacaagcggacgcataattttgagcagggaaatacccgcagccttcattgcgagtaactcgtatcgttcgccgaagttaccgaaagtaatcaaagaagccagtagcaccgccaacggcaacgatactggcactaatgtcaatgcggaataaaagaagaactgagccattacgctcatctccaatccctttccgaccaattcgtccacatatctccacaggaactgcatcataaaaatgaacagacaaatgaagaatgtgcccacaaagagcatcatgaagctctttacgatgaatatatctaatttctttatgcgtagcatcttaataggttcgtgcatttaagacgcaaaattagcacaaaaaaaggagcatcgaaaatttttagttgaaagttaactaaaaaccacaagttcttctcaatttagccacttgcgactcccacaattctttcatatcatccacttcatccggctccgcaaaatcagtgatttctaatacgtagtcacttgtcaactcattataagtcatcttaatttcaaagtaatcgcgctcgttctcgtcatcctcccaacggaagcggataaaagagaaagaacgtatcgccgtaatttcagcctttctctgctcagtctttccccaatgaaactctacaatcttatcatcggatatcactttgtctgcaaaccagtcctccaacccggtaggtgtactaatggctgcccaaagaatatttttagatgtcgcattcagcaaatactccaaatgaattttttcctttttcatagcaatttcgaattgtttttacgtgtgccaagataaatacttttttctaaatacatggcataaatcctacactttatttaattattctttcattttcaagtctcaaactccctgtttatagagaaaattaaaaaccttcttaaagaaaaaacacaaaaaagttgtgatttgttttggagtttatagaaaaacatctatctttgcacccgcaatcgagaaacgatggcgggatagctcagctggttagagcgcatgattcataatcatgaggtccccggttcaatcccgggtcccgctactaagccgaaaggcttgtaaattaggcaattaggaggcttccactcttggttgtcttttttgtttataagggtatttgcacagattttgcacggattttaatggatcaacgtaagaatctgagggattttcattttatgcatataatttagcgagtctatacaagaaaaaggatcaacgtaagaatctgagggattttcattttatgcatataatttagcgagtctatacaagaaaaatgctttatctcttactcctctgaactgtgccctgaacgctttgattttagcattaaatgattctgctgctgcattggtagcccttctttcaaagaagtttattatattcagatagtgcgtttgtatcgagcgcgctacccttccaaaggtgagaaaccccgctttgtctacttcatcataccaccttgcaagccttgtcaaagctatatctttaaacttacactgatgatagattgatcctaaccgcatggccatataatatcctttctttatatcgggatattctttaaatagaatctcggcccgtatcctttgagactgagtccatagagattcttttttgtaaagcagataaatactccttgccagcaactgttttcttgtatctccattggcgaaaacgggcgcatgatacatctttccgcaggtcttggcgtaagctatctgtatggactcttcgtccaaagcctcccagcgagctttcacccgcatctcctgaaccgcttcatacgctaatttctgtacatggaaacgatccgtaacccgtttggcagcagggaagcaagtccgggcaatctgttccatattgggagccatatccaatgttatctcacgcacctggtagcggcgacgacgcgaaagtttaagcaggacagaggtaaccgtgcaaacatccgtacctttaatgataccaataatactgcctttaccaccgtgagtctctttattaatcaacactgtatagagttctccacgggaaagagccacttcgtcaatacagacgtaggcaccaatgttcttctcaaacaggagccagttctctgcgtgagcaagctgatcccagtgtaggtaattacttaaatggttgcggtattgacgttccaacaaatccccgtcaacgccatataaagtacccaataacttgcaactgatcggataattatcaatatagttcttttaaaaaagacgcaaagtcttgcgtcaaacgagtaccctcagccaccatacgccaattgcgggaaatatactcattgctgcttttcaaaatccaacggcgacgacggaggttcaaaaagactttcttgccacgaagaggaaagtcttgaacaacaacaggctcataaaaccctttactctctgtttcttgaccagcatacttctcggggagctgattcttctcctcaaggtaaatgataacttcattcatgctttccttcacatcaacaagatcaaagtaatccaaagttccttcaggaagaagaaggtgataaccatttaacttcataagctattaatttggagacaaagataacaatttatatatttaaccctcagggttattcattgatccattttatcgggtcagtttgagtaagaaaatatataaagtactatttatatcgcttctttacatacaaagtaatacgtttatatgccaaagcgatgtgttcattcaccgtactttcacttatggataataattctgctatctctctgttttttaacttatccgacagtactagcctaaatacttctttacatttaggaggtaatgaatttatagcttcctgaataagcaactcatattcattatcttccataagactttcaggatcattactttcaggtattaactccacttcatataaagaaacatacgttttatcaggagagtaatttcggcgaagataatgaagtgcctgatttttggtagatgtatataagtattgctcaatagttttgatatgccctaaagattcccttttcttccaaacagtcgtaaatacatccagcacagcctcctcagccggttcctttgcttgtaaatagtaataagccacatgatacaatctttgcgaatattgttcaaacaattgccgcaaagcattttcatcaccggtgatgatcttatttagtaaaccttccggattcatttcattttacatattttagatagactttagggtttaaatatacattgctcccgtatacgcttggcaaatgtaggaatatataaaaaataatcaagtataaacccgtagtttttatttgttgctgtcatctatatataaaaacagcacaatgaaagaagattataacataaaagaccctaaggttgatgatttaattaatcgtcttcgcttcaaactaccggagtatgacactatttcgaactacaaacgactacaagaacggattaacactccggtaatatcgttaagtaagaatatctctccggcatggaagtggttttccattgctgcctcttttgctcttttggttgtttcagcctttcactttattgacttaagccgtccggaattagtatggtatgaagtcgcagcagttccggatgcaaaaacaaagattgtacttccggatagcagtactgtatggcttaatgccaatgcccgccttgtttacccccgttcttttgaggatgtaaacaggaaagtcagtatttcgggagaagcttttttccaagttcgcaaagacaagaatcatccctttattgtagatattgggaaattgcaggtcgaagtattgggaacctcttttaatgtaatgacagatacatacaatgatgaaataagaatatccttacttgaaggaaaagtggctttatatgaaaaagggcaatcttctaaatctgccaaaattcttatgcccaaccaagaagctaaatattcaccgtcaaatggtgaaattatgatttctcctatccgcatggacaatgtcatgtcatggattacagggaaatttagctttgaggataacactttggctgaaatcggagaagaattagagcgggcatttcacgttaagatacatattgaaaacgaggctatacgcaaaaagacttttaatgcaacgtttgaagataaagaaactctggacgaaatactctctattctccagatttcagcaaaatataaaatggagaaaaaacgcggagaaatctatatttattaattgtaaaaccctataaaataatactatgaacagctcttgaaccctaaaaaacatttgggaatgcgccaacatccccaaacgtaatcgttaaccggcagcccactacaactgccaagtatcaaatatttaatatacaaaaatatgaataataaattatttattagccataaaaacacccatttaagattctataactttattctttctaccaagaaaagttattccgtattcttaataagttgcatctgctttttcttttcaactaatccgctgatagcacaatctgtctcgttgaatttcaacaacgcgtcatacgaacagatctttaatacgattgagcaaaaaaccggatataaatttgtttataacacacaagaaatcaacaaacacagtttacgctctatcactataaaagacaaaaacatcgaaactgtattaaatgaactctttaaaaatacagatatatcttatcgtatatccaataaacatatcgctctgttcaaacaagtaaccagaaaaataacggggacggtaactgatcagactggcgaacctattatcggagcaaatgttcttgtgaaaggagccaaaaccggagtcattacagatttcgagggtaaatttacgttgtcggtaaccgacaatagcatactaatcatatcatacttggggtatgttactcaaaacgtctcagtaaaaggtcagacacattttaaaatcacattgaaagaagacacacaaagtctggatgaggtagttgtggtaggttatggcgttcaaaaaaaacgcgaccttaccggagccatatcctcagtgaaaatgtctgacactcctataggtacattctccacaactgctcatgcattagcaggtaaagcagccggtttacaggtaactcaaagcagtgcccaagtgggtggtggagccaagttccgcattcgtggtgaaacttcaatcaatgccggaaacgatcccctgttcatcattgacggttttccggtttctgcctcttcaacactcgactcggagaagaatttttataaaacaggtacagttgacaacatattatcgtctatcaaccccaatgacatagagtcgattgaagtattgaaagacgccagtgcaacagctatctacggctcacgtgcaggacatggcgttattatcattactactaaaagaggtaaaaccggaaaagccaaagtaacctattccggcaatctctctgtgcaaaccattaagaacaactataaaatgttgaatgggaaacaatacagaatacatagaaatatgtacctttatgaaaaatggttgaaagagaccggacaaggcatatatgccgattatataaccgacacttcttcgaaaacttatactcccagatatacagatgaagaaattgcaaccgcccaaaccacagactggctggacgaggtaacccgtaccggaatgcagcaatctcacaatgtttcattgacaggcggttctgagaaaacacaatatgcagcctctctaaactattttacacaaaaaggggtggtaaaaaacaatgcaatggaccggttcacaatgaaagtcaatctggatcaggaactatcaaaatatatcaaaacaggtttctcccttcatttaagtcgcaaccaatatgacaactcatcattgggagacaatgattttgaaaacgcaggtattatttcgtcagctttgcgcttcgaccccagtgtccccgtccgtgatgaaaatggcgattattcaatcttcccggatatggcacaataccccaatccgatatcgctgctcgaagttactgataaaacaacaagcgacagagttctggttaatggctatttacaagcagagccaataaaagggttgactttaaaagctaacctgggagttgaccgcagatatgataaaaacaaaagctatgtacctaacactaccgtagccggagctgcaaagggggggatagccaacatccttcaacgtgataatatagattatctcatggaactgacggcaaactatactaaagatttcgggaatcatagcctgacagcgctagtcggttattcttatcaacagtttaatcaagaaagcgtatatgccggcaacgaagacttctctacagatgggtttctttacaacaatctgcaggccggagccggaactaagccttatgtaaactcctcagccaggaaaagtgctttaggctcatactttgccagagcaaactattcttatttaggaaagtatctgctgacagttaccgttcgtgccgatggtgaatcaaacttccacccggactaccgttggggatatttcccttcagtgtctgccggctggaggttcagtgatgaagaattcatgaaacctttgtcaagcattctttctaatggtaaattgagagccagttacggacaaaccggtaattcaaacatagggaactatatgaccgactcttacggagtagtttccggctgggtattcggcaatgacggttatatgggtactgcaataaccaaaagaggaaacaaaaagttaacttgggaaactacaagtgaattcaacatcggtctggatctgggtttctttgataaccggatttcactatccatggaatattacaaccgaattatttctgatttgttggtaagtaataaaagtctgcccgcctataatgaaattaataccatagcagccaacatcggtaaaacccagggacgcgggtttgagctaacactgagtaccgtaaatatcatgaataaagactggacatggagtactgattttacgttctatacttttaaagacaactggtatgaacgagatcctaattggaagccagccgcatacgaatcaaaaaaagatccgatccgttcttactactcatatgtatctgatggcttgttacaagtaggtgaaaaagcaccggcatggcaacccactttagtacccggccaaattaaactgaagaatctatacgatacgggaacctcacctaatgtattagatcaatatgataaagtcaatcttggatcgcaagatcctaaatgcactttaggtcttaacaatacgcttagatacaaaaacctcgactttaatatttacttctatggcgaaattggccgcttacgcggagccagctattatgatgcctggatagtaggtcttggaaacagtctgacaaatgtatcacaacaatcattgcactcatacaccaatgcaaatcaaaatacaacggttccgaacctcattgagagtgcatacgatttcggagactattatcacaaaaagattaattacctgagatgtagaaacatcaccctcggatatacgattcctgtttccaaatcaatagctaacagcgtacgtatctctgcaaacgtcagcaatccgtttgtatttacaaactggaacggcgttgatcccgaaactgacacaggaaatttctcttatccaaacgtaacttcttttagtttcggtatagatatttcattctaataactgaaaaaacatgaaaatgaaaaaattaaatatatatatcattggacttttgactctcatgttgtgtgggatacaaagttgtgcgttagaatcagaggtattcgatgagatcaccccctcgatatacccccaaacagaacgtgatgtccgcgacctggttacgggaaatgcttattctccattccagaattacgattacggaggtttgtataatgtagctaatggagttatgcttatttcggacatggctaccgaatatggtttctgctcatggggcggatggatttgggaacctctggaatttgctcgttggacccccagtgacgaagatcgcattgcttatccttggacaaactacctgaaagggataagtaaaatgacacttaccatcgaccgaataacaaacgtaaacatgaataaagaccttttgaaccaatatatagcagagttacgttgtgcccgcggttttctggcctttttattatacgacctgtacggtcctattattgtagccgatctagagacgctcaagaatgcagaagatgaaataatccttccacgtttaagtgaagaggaaacacacaatttcatcgtcaccgagctgaccgaagctgcaaaagttttaccatatagttacgataaaagtagttcggattacggaagatttacaaaagggttatgccacatggtattacttaaattctatatgcaaacgaaacagtgggataaagctatcaccgaagctcgtgaattgcagaagcccgaatataaatacgcattggtgacagacaaaggggccgagaggtcagcttatgccaatatctttacatacgccaatgaaaagaactcggaaacaatctggtctgtaaactgtcttacaggttatcaggttcatttatggtatccccatgttatgccaagtaacctcaaggcatccgatgccggaagatttgatggtggctggggaggttataaaatgacatggaaattctttaaaacatacgaagatggagatgagcgtaaacaaactatcatctccgagtatgatacatgggaaggtactacccttaacgaaaccaacaagggagtgggaagtaactccttacaggacggtgtcattccattaaaatataaaatagaaagtaataatgcaggaaatcagtgtcagacagattggattgtataccgctatgccgatgtgttgactctattggcagaagccattgtcagagaaggaaatacagttacaacagaagccattaatttactgaatcaagtcagaacacgtgccggtttaattgcatatacagcttcttctttcagcagtgctcgtgatttccttgataaattattgatagaacgtgcacacgagttttatttcgaagggtgccgccgtcaggatcttatccgcgatggttcttatgtagcaaccatgaaacaaaaatgtaccgattacggacaagtgtctattgtaaacgaaaactatcatcgtttcccaataccggaatcagctattattgcgggacaagggattattaaacagaatccgggatattagtcatcacatatttttaaattaaaagaggaggtagtacatcaacactacttcaaagtggatattttgatgtacactcctcagctaatcatctaccatgaaatatattgttctttttcagcatctccagttgaagaacatagggctagtcttactatgctcctttatgttttccaacctgctatactcccaatcgacgagagaagtcatcaacttcgatcacggctggctattcaacagatacggtctacagcctgaaggtaaacgaatagatgagccttttgggaatggcagtccggattctccatctcctaaagagttagcctttaatgacaaagactggaggaaattggatgtccctcacgactggagcattgaaggacctttcagggaaaatctggatggctatacaggtaagctaccttggcggggaatcggatggtatcgtaaacgcttcaacatcaaaaatatagataaagataaaatgctttttcttgattttgatggcgtgatggccaatgcggaggtatatcttaacggaaagaagataggagaacgtccctatggctacatttccttcagggtaaatcttacgccctatattcgctttgattcggaaaatatcattgcagtcagagtggatacggagaaactgggttctcgttggtatcccggagcaggtatttaccggcatgtcagattggtcaaaaccaacaagcttcatattccccaatggggtgtgtttatttctacgcccgaaatcaatagccaatatgccaccgcatccgtgatggttcagttggctaatggaaagaaaaaaacggctagaagcagttacacaattgaaatattcaaattagataaagcaaacattccccgagaaagagttgcagtgggagctaaagagaatatcaaaattgcagcaaacgccatcgacagtagcttagtatctctgaaagtggagaaaccacaattatgggatttggaaaatacgaacctctatctagccaaggtatcagtatatgatagaaagacgttgacagatgtatacgatgtgccgttcggtttccggactttgaaattcacacataacaatggattcctgttaaatgggaaaagagttcaattgaagggagtatgtatgcatcatgatttaggtgcattaggtacagcaatcaacaagagtgccatagaacgccaaatcaacatattgaagagttttggcactaatgctatacgtacctctcacaacccacccgcacccgagttgttagaacttgctgacaaaatgggaatacttattctcgatgaagtatttgactgttgggctagtggtaaaaacgaaaatgactacgctgttcattattccgaatggcataaaaaggacattgaagcacttgtttgcagagacagaaatcatccttccgtcattatgtggagtttgggaaatgaagtagaagaacagtatcatcccgaaaaaggagtagtagcatatctcagggatattgtgcggctttacgactcaactcgccccgtcactttcggtgcctcatatcccagtaaaagtgctatcaatggtacagaactccaagtagatgtccatggcatgaactatccttcgggggtttatggcggtcctgatttttatgaaacatttctcaactatccggggcatgaacacttatcaggctttgccagtgaatccagttcaacaataagttcacgcggagtttattttccaaaaggttatcaagttacttcatatgacttgaaagcccctggttgggcatctcttgccgatgccgaatttactgcattagacaaatatccggctatttgtggtgaatttgtctggacgggatttgactatctaggcgaaccgactcctttcaatagcgatatgagcgtcttactcaaccatgccgcgctcagtgaagaagaactggttaaagcaaaagaggaactaaagagaatagaaaaagagcgtccttcctctcgtagcagctattttggtattgtcgatctagcgggttttccaaaagatcgttattacttgtataaagcacattggatgcccgatgagcctatggcacatattctcccccattggaattttccggataggataggtaaaataactcctgtgtttgtgtattcttcgggtgatgaagttgaactctttctgaatggtgaatctttgggtaggaaaaagaaagaacagtatcaatatagattcaaatgggagaatgttatatacactcccggagaattaaaggccattgcctacaaaaatggcaaactctgggcaacagaaagcgtaagaaccacaggagaaccggctttgttacaagtctccgcctataaagacaagataaaagtagctgacaatgaactggcttttatcacagtctccatccgtgacaaaacaggaagtgttgtaccaacggccaatcataagattaaatgcaaattagaaggtgaaggtaagattgtagcaacggataatggtgatccaacttcactcatctctttttcagcgacagagcgcgaaacttttaacggattcatgttagttgttataaaggctcatcaaggagcaaaaggaaaactacgtctaattgtggaatccgagaatttgaaaagtgcctctgtggatattaacctattataaatcattcttatttgaacatcatgacaacaaaattattaaatataaaaacaagacttttcagatcattgaccaatttgggtatgatgattattttattttcttgcagttcgtcatctatcggagaagaaccgataaaccctcctgctcctcctgcttcatccgtagaaaagagtgagtattatgtttccacaaccggtaatgatgagaatcccggaacacttacatcaccctggcgtaccattcaaaaagctgtcaccacagttaccccgggatgtgtagtaaatattatggggggaacatactatgaagaaataaaagtaactgtatccggaactactgacaaatacatcgtaatcaaaaattataatgacgaggaagttattataagcggcgacaataaacccagagaactaatgaatctcaatggcgtgagttatataaaggtaaaagggttaaccttcgccgattgcttgggatcatattctgtgggaataaaaatatccactacatccgacgaggcttctcatcatattgagatagaatcgaatacaatcagaaacttatatgcaaatgccaccgcaacagtttatccgccgaatgtatatgccggaggaataacagtagccggctatctggactcaaaagccattcacgacattataataagagaaaacacagtaaaagactgtcggacaggttggacagaagccatttcagtaacaggaaacgtagatggttttctgattactaagaacgtagtgactaatacaggaaacatcggtatagatgcgtcagggcattggggtatttcgaaaaatcctgccactgatttcgccagaaacggagtcatctctgagaatcatgtttcatactgcaaaagtcctgttgagggaggtgcaggtatttatttggatggaagttcaaatatccttgttgagaaaaacatttcgcacaacaatgtttatggtattaccgtagggtgtgaaagggcaaacaattttgtaactaataatataatcagaaataacatctgttatcacaatgaagggtttggaatcggactaatgggctggtcccctgaaggcagaatcataaaaaactgccaagttgttaataacacaacctttggaaatgcgaaagacagattgggagaaatagccatatacagcacggaaaatactacgattaaaaacaatatattttattcaactcacgcaaactcaaatctattatatgtagatgatagtcacctcaatctcgatatgaattttaatcattattattccagttctcccgatgttaagttttactggaagggtagcatattttcaactttcgaacaatataaacagaacacaggctgtgatttagcttcggctttcagtaatcctttattcattgatacagaagtattcgattttcagttacaatccacatctccgtgtatagatacaggtgatcccgcctatacacccgcagagaatgaactggactttaatcataaccctaggaaagttggagcttgtattgataaaggcgcttatgaaaagcaataataaaaaagcggtttactaatatcgaacctcatacaacaaatcctccccgaaagttttcaataccaaccttcgaggaggattttatttcattcttttattcccattctatggtcgcattgggtttaggcgacatatcatagcaaacacgattcacattcttcacttctttcagaatacggtccgtgattttcatcagaacaggccagtcaatcggttcaatagtagcagtcatggcgtctactgtattgacagcgcgaatgataaccggccaatcgaaagaacgggcattatcacgtacaccaacagatttgaaatcgggcactaccgtgaaatattgccatacttttttatccaatccggcaatctggaattcctcacgcaggatagcgtcggattcacgcacggcttccagacggtcacgtgtaatagcacccaggcagcgtacacccaaaccgggaccggggaaaggctgacggtaaaccatttcataaggtaatcccagctccagaccacaggcacgaacttcatccttgaacagttgacgcaaaggctctacaagttggaatttgagatcttcgggcaacccacctacgttatgatgagatttcaccattttagccgtcttcgttccactttccacaatatccggataaatagtaccctggcctaagaagtcgataccgtccaacttgcgtgcttcttcttcaaatacacggataaactcgctaccgataatcttacgtttttgttccggatcttccacacctgccagtttatccagaaaacggtcggtcacatcaagataaataaggtttgccttcaactggttgctgaatacttcaacgacatcctcagactcccctttacgcatcaaaccatgattcacatgtacacacaccagattatcaccgattgctttcagaagcaaagcagcaacaacagaactatcaactccgccggacagagccaataataccttcttatcgcctacttgacgtttgattaattctatctgatcattgacgaaattcgtcatattccagttagcttcagctttgcaagtatcgaaaacgaaagccttcacagcattcttaatagcttcaatatcatctgtgaattcagctagcttcacttcgcaagccgctttgtcatggccggcagccataacgggaatccccattgcatagatagccggatttacatcaatagccacaccatcaatgacattgttcgggccgccattgataataatacccttcacgttaggtaatgctttcaattcttccactgtgatgtcgtgaggataaatctcactgtaaactcctaatgcacggatggcgcgagccaataccgtattctcatgactacccaagtcaaggataacaatcatgtcctgtttcatctgattctgttttttttattatgttattgacaatagtttctttagtttcaacttatccgcaaatataaatattttaaaagacaaaaacaagacactttgctttatgccttcagccgtatcacaaaccggcttcctttgcctaattcgctttccaccgtcagcgtaccgccatgagcttccacaaaatctctcgaaatagacagccccagcccgctaccttgcactttcgttccgggtacacggaaataacggtcaaagatacttttgtgataacgaggatcaatccctttaccaaaatcctgaacatacaactcaatgatattatcttcttgcttggcaccaatcactacacgaccgttttctttggaataacggatagcattactcaataagttagtcaatacccaagcaatcttttcactatcgacaaagagtttaccgatcttttcctccggatattccacttctatctgaatattaaacttatcggcttgtacttgattggccttgatagcatactctatcagttcaatcggtttggtgatcttgggcattaattgcagttttccggcttccacctgagtcatattgagcaattctccggtgataccaagcaagcgttcactattttccttgatgctctttgaaagttgctcctgttcatcattcaatgcaccgacacgcttatcctccaacagttgaagactcatcataatagcagcaatcggagttttcaactcatgagaaatagtagagataaatgtagtcttggcagagtccagttccttaaattccgtaatatttttcagcaaaatgacatctcccagtttacgagattcatctttttccgcttctgtattaatgataggaacgtaggacgctttgaaatagctttctttattatcagcatatattttcaaaggttccttttgttcgcttggtgtcaccagttcacgaatcaaccgacggagcagatcattcttcaaagcaagttcttccgctgacttacgaatcacattttcacgcttcaaattcagcacattcaatgcctcctcattaataaacagaatctgccggtccatatttaaaccgatcaccggatcatctatgctgttcacaatcgcttcgataaatttcttggcggaaagaatatccgaaagagtgctggcacgatattcggtcaaccgttccgccattcgattaaagctatcggcaacttcgcgaaattcctcattcttatccatattcaagcgcttttcgtaattatgatcggctatttcaagaatcccctctttcagttcttttatcggtttactaatgctccggggaagccaataaagcaacacaagtccggtcaggatacagatgctgccggtaatggaaatccatagtaacgcacgttccagtccgggcatagcagcagggctatccggttccgttgccgttagaatttgaagatttacaaccgaaagagttaccagcagaataatcattccggccaacattccaataccaagaatcagtttcgttttaatattcataacgttcatacgattaatattatgcaagtataatcaaatctacattagctcgtgacaaattattcaaaaactttcgatatcccagtatggaacagatagcatacggcaatttcaggtcagggctacccatacatacagtggatatctgcttctctttacaaatctccacaatgctccccagaatatctctagactgtacctgaacgacctcccctcccaactctgtcaccagtttaaaatgattcagcagataacgctgtctcgccagaccaattctatccatgctctctttcggtgtctgaacatacagggcgataaaagtagtattgtaccgggttgccaactttgccgccttcctgataattctccgcggtgttttctcgtgactactgatacaagccataaacttttcatgtcttaacccgacagccactcccattacaacctcattctccaccttcttctccaccctcaatgcaacttccttcaaagccaactcgcgcaattgcagaatattctcagttcgaaagaaattgtccaatgctgtctgaatcttttccggacgatatatctttccggctttcaaacgggcaatcaactcctctgccgtcaagtcaatattcaccacttcatccgcttcctgaagaacactgtcgggtacccgttctttcacttcgatacctgtaatctcctgtacttcttcgttcacactctcaatgtgttgaatattaattgccgaaatcacattgattccctcgtccagcaaagccattacatcctgccaacgcttttcgttcagactgccctccacattcgtgtgtgccaactcgtccacaatgacaatttccggatgaatacggataattgtatctaggtccatctcttccagttcttttcccttatagaaaatcttacgccgcgaaatgacagggagcccttgcagcatcgcctcggttccgacacgtccgtgagtttcaacatagccgatttgcacgtccactccattctccagcagttcatgtgcttcctgaagcatacgataagactttcccacaccggctatcataccgatatagattttaaacttaccccggtgggatctcttaatcagatccaagaaatgctgtacactttgttctctatcatccatctttatctgttttttaaaacattctaacccgtgacaatcatcacgatcatcacgggttcacacactaataattcatgagttaatttaatttatggttttaaagttacgccaaatactaaatgggcgtcctccatacgtggattccatatagcctgtacaaatataggtaatgaaaatctctcattaaaattcagcgctttcgttgctttcaaagcaaagttcgttactgcaaaaccattcacattatactgcggagtttcataaggaaccatgccacaagtagcattcaaatcaactcctttcacgctaaacggataattcaactccacatacgaagaatacgcctgtttatcttcgcctttatcatttatctttctgtcggcacccgcaaacattgtataccacgcaatggacaaggggaatttttcaacaggaagcgtataagctaatcccgcttcaaaatgatgtcctgtatctccactcttgaaatggaaatagttaccggccccctgtccatcccaccaaagagtcgcaacagaaagcgccggtcctgtttcaccaaacttataagccgcagtcaggtctatttctttattactttcactcaaactagttgatccccatgcagtaagagaaaaattgcccacgctgaatcctaaagtcggctggaaggaggctgcgccaccctgatagataccacgccatacatacgaacttacaaaatcaccttgtatggtaaactcctgtgccttcacactagttgctcccaacatacatacggctgccacagccattgttctcaaaatactctttttgctaaaaaaacttttcatacttttattatctaatccagattctcacttacttaccacttttttcttccaacgctatgtttaatttcaacacattcactttttctgtccccaaaaatcccaataacggtttttctatactctcgtcaactattgacttcacctgttcctccctcaatccacgagcctgtgcaactcttttcacctgtacatacgcacattggggagtgatattcgggtcgagtcctgaaccacttgccgtcaccatttccgccggtacctctttacgactcaaataaggatgatgaacgaggaacgtatcgatacgcgcttttacttcgtccaagtattcctgattcgtaggtcctttgttgctaccggctgaacttgtcgcatcatatccgtcgcccgcacaggaagggcgtccccagaagtaaatatcctttgtaaacatctgaccgacattcgccgctcccactacttttccgtttagtgtgactacttcggcatttcccttgttaggacctgcaacctgtgcaaacagccacaagataaggatatagaacacggagaaaaagacacaaaaagcaagtgttatttttaaagacttcaataaagttttcattgctattgttttttaattaaaagaataaacctactaataaatcaatcaatttaataccgacaaaaggaacaatcacaccgcccacaccataaatcaacaaattgcggcggagtaaggcacttgcgccaatcggcttgtattgtacgccacgcaaagccagcggaatcaaaatcggaataataatcgcgttgaagattactgccgaaaggatagcgctttcaggactatgcagattcataatgttcagcgcggccaattcgggaatagctaccataaacaaagccggaacgatagcgaaatacttggccacgtcattagcaatagagaaggtagtcaatgtgccacgagtcatcagcagttgcttgcctatttccacaatttcaatcagctttgtcgggtcgttgtccaaatccaccatattaccggcttccttcgctgcttgtgtaccgctattcatcgctacccctacatttgcctgtgccaacgcaggagcatcattcgttccgtctcccatcattgcaaccaatttcccggcctgctgctccttcttgatatattccattttatcttccggcctagcttcagcaataaaatcatctactccagctttttcagcaatatattttgctgtcaacgggttgtcaccggtcaccataaccgtcttcacacccattttgcgcaaacgttcgaaacgctcctgaatacccggtttgataatatcctgcaattcaataacgcctactactttccgattgacacataccaccaacggtgtaccgccattacttgatatagtagaaattatctcttccacctctttcgggaatttatttccggcactctctaccatcttacggatagcatcaaatgcccccttacggatctgtgttccgtcagccaaatcgacaccggaacattttgtctcagcagtaaacttaatcatgcgtgccccagccgtattcaggttacgcatacggatacccgattcacgtcccaactccactattgactttccttccggagtttcatcggacagggaagacaacagacagttttctacaaaacggtgcaaatcaacgcccggtgccgtgtggaagtgagtggccttacgattaccgatcgtaattgtaccagtcttgtccaacagcaacgtatcaatatcaccggcagtctctactgcttttccggattttgtaatcacattcgcacgaagtgcacggtccataccggcaataccgattgccgagagaagcccgccgatcgttgtcggaatcaggcagacaaacaaagagataagtgaagcaatggtgatgaccgtattactataatcggcaaatggtttcaaggtaacacacacaatgacgaaaacgagcgtaaaacctgccaacaaaatagtcaacgctatctcattcggggttttctgacgtgatgcaccttctacaagcgcaatcatcttgtcgagaaaactttctcccggctgagtagtcaccattacttttatacgatcggataatactttcgttcctcccgtaaccgaactcttatctccgccagcctcacggattaccggagcagactcaccggtgatcgcactctcatcgatagaagccagtccttcaataatctcaccatccgacggaatcacatctccggcctcacaaacaaatacatcccctttcttcaattgcgaagaacttacggtaataattttattaccttctactttttttgccggtgtttcttcacgagtcttacgcaaactgtcggcttgtgccttaccacgcgcttcggcgatagcttcggcaaaattggcaaacagcaatgttacaaacagaatgacaaacacagcgatattgtagccaaacgacccctgtgaagcgtttacaatagagtagagcgtcacgaagaacatcaccgccgtagccacttctactgtaaacataatcggattctttatcatcatccgcggattcagtttcacgaatgactgtttcaaactttctatcacttgctccttttgaaacaaagaagctgatttattatctttcatatctattacaaacttaaatgttcagcaatcgtactcaatgcatgtaccgggaagaacgacaaggcggcaacaatgaagataacggcaaatgtcattaccccaaacgtcaacgtatcggtttttaatgttccggcactttccggaataaacttcttctgcgcaagcaaaccggcaatggcaacttgtcccacaataggaatgaaacgactaagaatcaatacaataccacatgtccagttccagaaataagtattatcacccaaaccctcgaaaccagaaccgttattggcagccgaagaagtgtattcataaagctgctcactcagaccgtggaatccgggattattcaaccaaccgccttcactttccacaaattcaggataatgcgcataaatataactggagatggctgtaaataccaaaattacaaacggatgaagcaaggctacaatcgtagcgattttcatttcacgggcttccacttttttacctaagaactccggtgtacgtcctaccatcagaccactgataaatactgctataataatgaatgtatagtagttcatccatcccacaccgacaccaccaaaccaagtattaatctgcatattcagcatttccatcataccggacaaaggcatagtggagtcatgcataccattgacagaaccattggaagtcaccgtagtcgtaatactccaaagagctgttgcaccagctcccaaacggacttctttgccttccattgcaccattatcctgcgcaatgcccaattcatcgatacgcggattcccccccatttcctggctgacattaatgcagacgcctaccagataagcaaaaagcatgactccgaatatgctatatcccaatttcttcctgcgggtataaaatcccagtgcaaacaccattgccatcgggataatcaggatggaccagcattccgccatattggtaagataagtcgggttttccaacggatgagaggagtttacaccaaaataaccaccaccatttgtacccaattgtttaattggaacaatcgcagccgtaggaccttgggaaaccatctgctcctgaccttcaagagtcgtgactttcatcttgccgtcaaatcccatcggagtcccttggagaatcaggataaaacctacaaccagagaaagaggcaataagatacgtgtgcagctaactacaaggaattgccaaaagttaccaattgtttttgttgtttttgcagcaatacttttcatgatacctgccatagcagccatacccgttgcagcagtaataaactggaaaagcatgatgacgaacaattgtgtaaaataagtcaatccgctctcgccgctataatgctgtaagttacagttaaccatgaaactaatacacgtattgaacgcctgatcaggagtctgcggaccgttaccgtccggatttaaaggcagccaaccttgtgaaaccaaaagcaccattccccagaaaaaccaaaaagcattcaatatcaataatgctttcaggaattgtttccagttcatctcttcgtcaggattgattccacaaactttatagataactctttcgacaggagccataaaatcagaccaggtcttttctcctttatagaccttggcaatgtattttcccaatggataagccagaatcaccatcaaagcaatctgaacaaccacgcctaaaatttctgtattcatatactttttaccttaaactgtgtgtgttactttaaaacttctcgggtttgacgagtacatacatcaaataaccgaagatcgcaatacctaatacaaataatactgtgtacataatcaattctccttctttttttaaatattctcaaaccagtctacacatttccagaataaccagaaacaggcgaagccgcttaacaggcagaaaataaatgataatgtaatttccatgttttttcttttaagtgattattattagttttacttgccagtctttatgccaaatgcgtgccacaaaagcaagaaaacatataacatgctaatatacagaaagttataaatatttcacagaatatctatccttacaagaaacccttccattttgaaaaaggcattctattttgaaaaggttagtacttttcggcaatttctgaaagagaaaaaacaaaggatttttcaaattggaaggttatttccattttgggaaggtagaatatataagaagctttttataacctactgaaaacaagcggctaaccactcttatacaataattggtatacgctttgcctataaacagatatgaaactttatattatatcaaacagattacctgtcaaagcagccggttcaaatggaacattcgtcttttcacgcagtgaaggcgggctggcaacaggtttggattctctccaaacttcttatgagaaacattggatagggtggcccggcgtatgtacagacaacgaaaaagaccgtcaagaaatgaatgagaagttacaggaaatgaattttcacccggtcttcttatcggaaaaacagattcagaactattacgaaggatatagcaatagtaccctctggcctttatgccactatttttacgcctataccttatataaaaaatgtttttggcactcctatcagcaggtcaaccaacttttctgcgatgaaatttgccggctgatacgtcccggagacaaggtgtggatacaagactatcaactgatgttacttcccggtatgttgcgaaaaatatatccggaactctgcattggctatttccaccatatcccgttcccgtcctacgagcttttccgtatcctgccggaacgtgccgaaatactgaaaggcttactgggtgcagactttatcgcctttcatactcatgactatatgcgccacttcgttagcaccgtagaacgtgtccttcatcttgacttcaatctggatgaactacaaagcggtaatcgtgtagtgagagtagacgcactaccaatggggattaactatgagctttaccataaagcctcggaaaacgaaaaggtacaccaagctattgaccgcacccgaaaacttttcggcaaacacaagttagtcctgtcggtagacaggctggattatagtaaaggaatattgcaccgcctacatggcttctccacttttctcgaacgtcatcccgaatattatggcaaagtgactctggcaatggtcattgtcccctcacgcgaccatgtaggcagttatgcagaattaaaaacaaaaatcgatgaagagataggttccattaacggacactactccacaatggactggacccctgtctgctacttctaccatggcttctcgctggaagaactgaccgccatgtattatgttgccgacattgctttgatcaccccgctacgtgacggtatgaacctggtagccaaagaatatgtagccgccaaatgcgatcacccgggtgtgcttatcctcagcgaaatggcaggtgccgccgtagaattaacagatgctatccaaatcaacccgaacgatacggaacagatagagcacgccatctgccaggcacttgaaatgcccgaagaagatcaaagggcacgtttacaacgaatgcaagccattttatccgtacaaactgtcaataaatgggctaccgacttcatcaacggactgaatacgacgtgtatccaaaatgatacgctacggaaaaaacgtatcgtgcccaccactatcgcccaaatcaagctcaagtacaatcaggcaaaacaacgcctgatattgctggattacgacggtacactgacagcactcaagccacgtcccgaagatgccaaacctacacctgaacttatttctattctacaacaattagccagtgatcccgccaatcatatagtcatcaatagcgggcgggatcactttattctggaaaagtggtttggcctccttcccgtatctatggctgccgaacacggagcattctataaagaaaacggggtttggcacaaaaagattaagaagacagaatgggggacaggacttctttctatcctgcaaatgtttgtagacagaactccccgttcacatctggaaataaaggagacagcattagcatggcattaccgagaaagcgacgcatggctcggcacactgagagcacagcaactcgtcaatgcactggtttcgatctgtactcggcaaaaactgcaaattctacaagggaacaaagtggttgaagtcaaatcaccggattgcaacaaaggctcggaagtagagcgtttgctggctaacagacgttatgatttcgttatggcaatgggagatgacacaacggacgaagatatgttccaagctcttccggccaaagcggtcaccattaagataggcaacgtatcaaaagcagccaactacaatctgcccgcacaatctgatgtacttcctttcctgcaatccatgctgagaaagcaaaaaaacaccgacacaacgaaaagctatgtcagaaaccgcctgacttccgctttcagctttttcagagacttattgaaaactaaataaaaacaagcgttatgaacaatcagaattatggagtgataggtaattgccgcacgtccaccctcgtttcacaaacagaagccctctcttttatttttttcatagtaatcatcctgcaaagtttataaacagacgaagcccctccggtatttctactgaaggggcttcataaaaaacggcggctacctactctcccactgttacgcagtaccatcggcgtgacgaggcttaacttctctgttcggaatgggaagaggtggaaccctcgtgctataaccacctgaaaaaggttatgacatgacgaaaagtaaaatgaaagacatttgacaagctaaacgtatataacaaccgtcccgcagaaagaaagtggacgggcaattagtaatgctcggctatgatgttaccacctgtacacctgcatcctatcaacgtcatcgtctttgacgaccctaagaaatctaatcttgtggctggcttcgtacttagatgctttcagcacttatccaatcccgacttagatacccagcaatgcacctggcggcacaactggtaaaccagaggtcagtccaacacggtcctctcgtactagtgtcagagccacgcaaatttcatacgcccacgatagatagagaccgaactgtctcacgacgttctgaacccagctcgcgtgccactttaatgggcgaacagcccaacccttgggaccttctccagccccaggatgtgacgagccgacatcgaggtgccaaacccctccgtcgatatgagctcttgggagggatcagcctgttatccccggagtaccttttatcctttgagcgatgtcccttccatgcggaaacaccggatcactatgctctagtttcctacctgatcgacttgtatgtctcccagtcaagcgcccttatgccattacactctacggacggttaccaatcgtcctgagggcacctttagaagcctccgttacacttttggaggcgaccaccccagtcaaactacccaccaaacagtgtccccgttacaacgggttagaactcaaataatcaaagggccgtatttcaacagcgactccacacaaactggcgtctgcgcttcaaagtctccggcctatcctacacatcaattacccaaattcaatgttaagctatagtaaaggttcacggggtcttttcgtcccatcgcgggtaatcggcatcttcaccgatactacaatttcactgagctcacggttgagacagtgtccagatcattacaccattcgtgcaggtcggaacttacccgacaaggaatttcgctaccttaggaccgttatagttacggccgccgtttactggggcttcaattcaatgcttctcttgcgatgacatctcctcttaaccttccagcaccgggcaggtgtcaggctgtatacgtgatctttcaatttggcacagccctgtgtttttgttaaacagttgcctggacctattctctgcgcccaactctcgttgggaccctttatcccgaagttacagggtcaatttgcctagttccttaaccgtgaatcactcaagcgccttagtatattcaacccgactacgtgtgtccgtttgcggtacgggtacctcaaggattaagtttagcggattttctcgggagtatgtttacacgcactattaccgtttcccgaaggaattggtatactatcaggttcgactctcgtggtggatttgcctgccacaatcaacatctacacccttcaacggactattccgtcagtccgcggcgttgtcacgactccgtctccacgtcactccttaaggtagtacaggaatattaacctgttctgccatcggcctcaccgttcggctgagccttaggacccgactaaccctgatccgattagcgttgatcaggaaaccttagtctttcggcgagggggtttctcaccccctttatcgttacttatacctacatttgcttttccacacgctccagcaaagctcacgcttcaccttcgacgcggagtggaatgctcccctaccgatcattaatgatcccatagcttcggtaagatacttgatgcccgattattatccacgccaaactcctcgactagtgagctgttacgcactctttaaatgaatggctgcttccaagccaacatcctagctgtcttagcaatctgacttcgttagttcaacttagtatctatttcgggaccttagctgatggtccggattcttctcctttaggacatggaccttagcacccatgccctcactcctgtgatagaactaatgcgcattcggagtttatcaagacttgataggcggtgaagccctcgcatcttatcagtcgctctacctcacattagtaactcacaaggctgcacctaaatgcatttcggggagtacgagctatctccaagtttgattagcctttcacccccaccctcagctcatccggaagcttttcaacgcttatcggttcggtcctccagttagtgttacctaaccttcaacctggccaagggtagatcacttggtttcgcgtctactccttccgacttatcgccctgttcagactcgctttcgcttcggctacggatctccagatccttaaccttgccggaaaaagtaactcgtaggttcattatgcaaaaggcacgccgtcacagcataagctgctccgaccgcttgtaggcgcatggtttcagggactatttcactcttctattcgaagtgcttttcacctttccttcacagtactggttcgctatcggtctctcgggagtatttagccttaccggatggtcccggctggttcacgcaagattcctcgtgtcccgcgctactcaggataccactacgcttcgttcagcttcgaataccggactatcaccgtctatggtttcattttccaaagaattcttctcactgaatgtcttgcgacaacgtggtcctacaaccccaatattgccgtaacaacattggtttgggctaatccccgttcgctcgccactacttggggaatcattattattttcttttcctacaggtactaagatgtttcagttccctgcgttagcctcctgccaagcaggatgacattccttcagaatgtcgggttgtcccattcggaaatcttcggatcaaaggttatttgcacctacccgaagcttatcgcagcttatcacgtccttcatcgcctccgagagccaaggcatccgccatgcgcccttgcttactttctttcaaactgactgctccgaaaactatccattactgaaatgggaaatatcggagagagtacggtttgatatatacttttagctctttacttttattttactttttgtacatcatgtcaaagatcgtttcccattgctggggatgtggagaataacggattcgaaccgttgaccctctgcgtgcaaggcagatgctctagccagctgagctaatcccccgtaagagtcgtttcggagtagtcccaggcagagttgaactgccgacctctacattatcagtgtagcgctctaaccaactgagctataggactagttcaaccgtgtctgtctttagactcggcttctgttttctcttgtttatctctatctatattactatagatggttgatctatatattataaataaacaagtaccagtagtacaatctgaacagaacccggttcaatattcccctaaaggaaatgaaccatgaagtcattgtaacgacatcgctccagaaaggaggtgttccagccgcaccttccggtacggctaccttgttacgacttagccccaattaccagttttaccctaggacgctccttgcggttacgtacttcaggtacccccggctttcatggcttgacgggcggtgtgtacaaggcccgggaacgtattcaccgcgccatggctgatgcgcgattactagcgaatccagcttcacgaagtcgggttgcagacttcgatccgaactgagagaggtttttgggattggcatcctgtcaccaggtagcggccttctgtaccccccattgtaacacgtgtgtagccccggacgtaagggccgtgctgatttgacgtcatccccaccttcctcacatcttacgacggcagtctctccagagtcctcagcatgacctgttagtaactgaagataagggttgcgctcgttatggcacttaagccgacacctcacggcacgagctgacgacaaccatgcagcaccttcacaaatgccttacggcctatgggtttccccataattcatttgcaatttaagcccgggtaaggttcctcgcgtatcatcgaattaaaccacatgttcctccgcttgtgcgggcccccgtcaattcctttgagtttcaccgttgccggcgtactccccaggtggaatacttaatgctttcgcttggccgcttactgtatatcgcaaacagcgagtattcatcgtttactgtgtggactaccagggtatctaatcctgtttgatacccacactttcgagcatcagcgtcagttacactccagtgagctgccttcgcaatcggagttcttcgtgatatctaagcatttcaccgctacaccacgaattccgcccacctctactgcactcaagactgccagtatcaactgcaattttacggttgagccgcaaactttcacaactgacttaacaatccgcctacgctccctttaaacccaataaatccggataacgctcggatcctccgtattaccgcggctgctggcacggagttagccgatccttattcatatggtacatacaaaaatccacacgtggaccactttattcccatataaaagaagtttacaacccatagggcagtcatccttcacgctacttggctggttcagactcgcgtccattgaccaatattcctcactgctgcctcccgtaggagtttggaccgtgtctcagttccaatgtgggggaccttcctctcagaacccctatccatcgtagtcttggtgggccgttaccccgccaacaaactaatggaacgcatccccatctcataccgaatttctttaatataaaacccatgcgggaaatatatgctatcggatattaatctttctttcgaaaggctatccccgagtatgaggcaggttggatacgtgttactcacccgtgcgccggtcgccagctttggtttgcaagcaaaccaaactgatgcccctcgacttgcatgtgttaagcctgtagctagcgttcatcctgagccaggatcaaactcttcattgtaaaagtattttttaatcggcatatgccggttatagctctgttcaggatgccgtacaatttattgacttcattctaatacctatatctatcacatatatatgaacatatataacagactgtattgacggttctatcttttcttgtactacttgtattgtttatcaatatttcaaagaacttgtcgcttccgtttcaaaagcgggtgcaaaggtaagaggtttatttttaactaccaaactttttcggaagttttttttcagtttttctttttatccgtttctcagactctctatgcgaaagggaaagaataaatagaaagaagaacaagcaaaacaccttttctttgcgaatcggactgcaaagataagaacttttttatttatattccaaaacttttcggaagttttttttgttcttgagtcaagcagtcctgcgctttgtcactaagtcattttcatcaaggctttcttctctcggaaagcgggtgcaaaagtactccctttcaggatacaaaacaaatatatatcactcttttttctgattatttttttataatcagactaacttgctgattgataggctggttcaagaaaaccgccgtttctatacaagaagctacgaagggaagaatacaaaactatacacattattatatttaaacgagggaggaaagcactaaacaaagaaacaagtaatgcaggcagatttattcggtactaaaaaaaacaggccggatataaaaagcggggaattacccattccgacatttacataccacctacccctgaggcgaatcatccttccggaaggaggagaataacggataatcgaaaagacatgctgttcgttccactacaatgaacaggacagggaacttcagtggaaagaaccggccaccggagtgaaaaagcccggccaccggagtggaacaaaaaagaggataggggaaaagcacaaggcaggagaaaaatatggagtagagagaagaaagaacaggagaggaggctatgagaaatgaatcgattatgagggaaaacaacagaaaaactatgagaaataactctgtccctttttatttctcataaattaattaattgagaataaattagttatacaaaaaacatgagaatatgagatatgaaattgaaaaatcttttctggtagaaacctaagttcaagttataaatgcgacacccctaattttataaattgaattcagcagcaaataaaagtgaaacaactcatttccagcgagccccacttaagactcatcagcccacgccgttttgacaagacaagccttgtacaaaaaagtaacgaagggactgccaagccccgtgccacagctaaacttacagttagtgacagatactgaagacttagcttcacatttgctaagactgatactccggcaataccctttagaatgtttaaaacatcttcttacaaagcctgggtatagcttctttcagcactgccgaaggtacgtggaaattctctcttaacttcctcttttttcagattttatattcttctatcttccgatacaacgtagtaagcccaattttcagcagacgggcagcttccgtcttattgcctttcgtatactccaacactcgtgcaatatgtcttttttccatagctgccaattcaaaattcccggcattatcatccgagcattcgtaatgattgttctgaatctccaaaggaaggtcacatacatccaaccgtccgccttcacagacaatcaggctgcgctcaatcacattcctcaattcacggatattgcccttccaaggttgttgttccaaggcttccagaaaagcgggagtcatttcgttgacggcatacgaaaggcactcggagaaacttttggcaaaggcagtagccaagatcttaatatcgccggcacgttcgcgaagtgaaggaagatgcacctgaaacacggaaagacgataaaacaagtcttcacggaaatgtcccaccctgatttcttcctgcaaattgcggttggtggcagcgatgatacgcacgtttactcttgtaggtttcgtgtcaccgatctttatatattcgcccgtttcgaggatacgcaatagtttggcttgcagttcaaaagccatttcgcctatttcgtccagaaagatagtcccattgttagcttcttcaaaaagccctttcttatctttcaatgctccggtaaatgaaccggctctgtgaccgaacatttcactctccaacagttctttgctgaaagaagaacagttgaccgctacgaaattctgtttactccgtttgctgctgtaatgtatggcttgcgcaaagacttcttttccggttccggtttctccggtcaatagtaccgggacatcagtcaccgaaactttctgagccagcagtacggcctctttcaaagctttcgattcgcccaagatagaatcaaacgaatacatctgccccaccttcttttcgagtttttcgagccggacattcatttttgctttctctacggcacgactaatcagcgggataatcttgttgttatcatcgcctttggttatataatcgaatgcaccgttcttgatagcctgtaccccatcaggaatattgccgtgggcagtaagaagaatcacttcgacgttaggagctaactttttaatgttcagcaccaagtctaccccatttccatcaggaagaaagacatcgcatagcgccacatcaggcgattgtgtctccaactgtttgagagcagccttgcagtcgccggcctgacatacttcatagccctccagtcccagcatacgcgccaacaggctacgaatctgaacttcatcgtcaataacaagaattttactcataatttacctatattaaaaatagaagaatgaaaacagggtgcgcaaatataagttttttccgtgaatccatgaacatttctttcatactgttgttatttccacaggaaactatttacaccaaaaacagaatatatgaaagttattatcatcggaggtgttgcaggaggagctaccactgccgcccgaatcagacgagtagacgaagccgcagaaattatccttctggaaaaaggaaagtatatatcttatgctaattgcgggctgccctattatataggaggagtgattgaggaacgagagaaattattcgtgcagactcccgaagcattctccacacgatttcgtgttgacgtgcgtacggaaaatgaagtgatcttcatcgaccggaaaagaaaaaccgttactgtccgccgcagcagcgaggacacttatcaggaaagttacgacaaactacttatttccaccggtgcctcccccgtacgtcctcccctgccgggaatcgacctgaacggaatcttcacattaagaaatgtagcggacacggatcggattaaagaatatatcaatacccatgctccccgaagagccgttgtcatcggagccggatttatcggactcgaaatggcagaaaacctgcacgcacaaggagcaaaagtttcaattgtagaaatgggaaatcaggtaatggcccccattgatttctccatggcttcgcttgttcaccaacatttaatggaaaaaggagtaaatctgtatctggaacaagccgtagcctctttcgaaagagaagggaaaggactgaaagttattttcaagaacggacagtccgttcctgccgatattgtcatcctatctatcggcgtgcgtccggaaacgaatctggcacgggctgccgaactgacaatcggtgaaaccggaggcatcgctgtgaatgactatctacaaacttccgatgaatcgatttatgcgatcggcgacgctatcgaattccgccacccgattacgggcaaaccgtggctcaactatctggccggacctgccaatcgacagggacgtatcgtagccgacaatatcctaggcgccaaaattccttatgagggatcgatcggtacttcaatcgcaaaagtattcgatctgacggtcgcttctaccggtttacccggcaaacggttgcgacaggcagagatcgactatatgtcttctactattcatcctgcttcgcacgccggttattatccgaatgccatgccgatgagtatcaaaatcacattcgataaaaaaacgggaaggttgtacggaggacagattgtcggttatgacggagtagacaagcggattgacgaaatagcgcttgtgataaaatataaaggtacaatctacgacctgatgaaagtggaacaggcgtatgctcctccgttctcgtctgccaaagatccggtagctcttgcaggatacgtggcggaggatattatttccggaagaacacgacctgcctactggcgggaattgagagacatcgaaatggaaaacaaattcctgctggatgtccgcacacaggatgaattttcattgggcacgctgccgggagctgtgaatattcctttggacgaactgagggacaggatagccgaactgccgaaagacaagatgatttatacattctgcgccgtaggattgagagggtatcttgcttaccggatactgacacagcacggatttgaaaaagtccgtaatctgtcgggcggactaaaaacatatcgcgctgctaccgctcctatcattatacacgaagaaaatgataatgagacggacgagacaacagtacggcaagaagcaacggttcaggctagcaaaccagttgctcctgtcgaaacagccaagactatccgggtagacgcctgcggcctacaatgtcccggcccgattttaaagatgaagaagacaatggacatgctcgcttcgggagaacgcgttgaaatcactgcaactgatccggggttccctcgtgacgccgccgcatggtgcaattcaaccggtaaccaactcgtttcgaaagagtcttccggaggaaaatctgtgatagttattgaaaagggagaaccaaaatcgtgcaacattgttacttcttgtgacagcaaaggaaaaactttcatcatgtttagtgatgatttggacaaagctttagcaacttttgtactcgcaaatggtgcagcagctaccggacagaaggtgacaatcttcttcacattctggggactgaacgttatcaagaagttgcacaagccgaaaaccgaaaaagatatcttcggaaagatgttcggtatgatgctgccttccagttccggaaagctgaaactctcgaagatgagcatgggcggaatagggggaaaaatgatgcggtatatcatgaataagaaaggaatagattcattggaatccctgcgtcagcaagccttagaaaacggagtggaatttattgcttgtcaaatgtcaatggacgtcatgggagtgaaacaagaagaactcctcgacgaagtaacggtaggcggcgtagcaacgtatatggaacgggcggataacgcgaacgtgaatctatttatttaaaagatatgactaataaaatatattcaaacaaaatatgaaaacaatatgtgcaatgcgcgaagtgttcagagccatgtcgagctttgaaactgcatttgaaaaagtataccggataacgttgaatgaagcgatgatattatgcatcctcaaagacgccaccgagagaatgacggcaactaacctgtcgaaaagtacagatttaagtccctcacatacatcgaaaatgctccggatactggaagaaaaaggattgattgtcagggaactcggcaacgaggaccgccggcaaatgtactttcacctgtcttcaacaggcaaacaacgggttagcgaactggaagttgacaaggtggaaatgccggaactgctgaaacctctgtttaaataaacggaatttcaagcaagaatctgtaaagaatgaatggtaagcaaactagctgttgatgcggcaaagagcttaccttttttattgaatcccgaaaaagaaagatgttaattttccggcaaaataatttttcacgcgaacctttttatttttttcttgttgtttctagcaaaagccccaaggtaccagggcgatgattttatataacctaaacattataaaagatatgaagaaattaattcctattttattggcggtctttgcactcgcttcctgcgaaaaagacccggacatgggtaagctggatgacaactatctggtatacactaaccacgacgagaaagctgacttcaaagttcctacattctatctggcagacaagattctggtgatctccgatagtaaagaaccggaatatctcgaaggagaaggcgctgaacaaattctggcagcttatacggataacatgattgccagaggttatgcagcagcaaccaacaaagaaagcgctgacttgggtattcaggtgagctacatcgcaagtacttattatttcaccagttattcacagcctgaatggtggtggggttatcccggttactgggggccgaactactggggcggaaactggggtggcggctggtactacccgtacgctgtgacttacagttatagtaccaactcattcctgacagaaatggtgaacttgaaagccgaacaaggcgaaagcaaaaagctgcccgttgtatggactagctatctgaccggatttgacactggatccaaagctatcaaccgtactcttgcagtagaagctgtcaaccagtcattcgctcagtcaccttatcttactaacaaataaacaactacaactgttatgaaaacaagaaaaaatatatatttcaaggtagtggccttggcggtcattgctatcgctttcgccatgccggccaaggcacagctatcagacaacggatatgctaatatagactggcagttcaatgctccgttaagcaatcattttgccgacaaagcaagtggttggggaatgaacttcgaaggtggttacttcgtgactcccaacatcggtttgggacttttcctgaactatcacagcaaccacgaatatgtaggtcgcgaaacattcaaaatggccggtggtgatgtcactaccgatcagcaacatactatattccagttgcctttcggtgctgccgcacgctaccaatggaatcgtggcggagccgttcaaccctacgtcagtgctaaattaggtgctgaatatgctaaagtacgctctaacttcaatatgctcgaagcaagagacaatagctggggattctacgcttctcctgaaatcggtatcaacgtattcccttgggtatacggaccggggcttcactttgctttatattacagctatggtaccaacaaggctgatgtactgcattacagtgtagacggtttgagcaatttcggcttccgtctgggtctgtcattctaagcccggcaacaatcagaattacattaataataaataaggagtgcccttctgctatcataagcggaaggacactttattttatacctgtgttcagtgcggaaggattactttttcttcatcgcatcataaatcacttcctgtatccgctcgcgtatgtgcagcctaattaacttgcgattggtaacatccggataaatccggttgctaagaaagacataaaccagttcgttaaccggatccacccatgcgcacgtaccggtaaatccggtatgaccatagacttctgccggagcatcgggagcgcagttccctttcttcgagtcttccctatccggtttatcaaatcccagtccccgccggcttatctttgaaaccgaagtagtgaacaactggcaagtctctttgctcaaataacgccggccgtctatttctcccccgttcaataacatctgatatacacgggctacttcgcgggcagtagagaataatccggcattgccagccaatccgccgaagaaagcggaagcctcatcatgcacgaatccttgcagggtatctttccgcaagaagcggtcgttattggaaggaacgacttccgactttgccagacgacgcaaaggcaggtaacctgtacgctccagtcccaacggttcgtaaaactcgctttgcaagtatgcctccattggcattcccgcaagctgttcaaccagcattcccaacaggataaatccaatatcactatatacataacgtttctgccccaacggcgcttccacaattttctcttctatcaccttgcggaacgatcggttcaaccacagattatcacagatttgaatggtataatccccggttttcgttggagatacatattcttccttaaacttgaaattcggatttgcccacgtatttgttcctatattcaccggatgctgtgcatctctacgcgcactgaacaaacggcctttatagctatccttatcaatcacttcctgatagaaaggtagccaagacggcagaccggactgatgatacaggatctcctgaatcgttatgtcctttttattggtgcgctgcaaaaacggcagataatccgaaatcttatctgtcaggttaaagcgccccttatcatagagtttcataacagcaagcaaggtagccgtcgttttcgtaagggaggccaggtcatagatatccgatgattcgacgcgggcacttccttttcctgtatgtgtgccgaaagctttatcgaccattacatgaccatttttcataactactacctgacaaccgggataggctccttgccggataccgtccaaagcaacagaatcaatccgcttcaacgacacagatgaaaggccgtattcttcaggtacaaaatgcaaaggagttttcggagtgattgtcacccccgcacctgtatggaataatccgcccaaactcgccgacaatcttccatccgcagtggctttggcaaataagacgtctgccacctgacgctgaatatccgtattgtggctatgcgctaacactactgccgaagcatggctcaccgcgcgctgaatctgtaacatcatcttgccgggggtgaagaaaagatagacaaccggagcatcgggagcaaacttcgtaaagaatggctgataagaagccaggcgttgttcgctgacagctactacaactcgtttataaatagctaatgaatcatataatcgacggttttcttcttctgtctgtttcggacgaaggcggaaacgaaccagagatgcataacgtgtcatttgctttgctaatgcttccgtctcacccgggtcgcctacttcgagcaaagctatcttctggtctttgtccgtatgtagcggcagtacatgatctttattattcagaacggtaattgccgccaggttcagccggcgcaccaagtcgcgcgcctgcgggctgttcacccgctgctccaggccggacaattgcacgtacttctttttgctaagtcccagcgcatatttgtaggtcagtaccttgcggcatttactttctatatcttcccggctcagttcgcctttttcaacagctgcaagcacagccggcacttccgccttcagattacgtggagccagtaccatgtcattacctgcctgcaatgcctgcaagctgacattcccattgcccgatacgcccctcatggcaagcgcatcagtaaaaatcaatcctttaaaagccagttcatccgtcaataagtcgtatacgacattgcgagacaaagaagacgggagcccgccgatcggctcaatgaccgggacttgcagatgtcccaccatcataccacctactccggcacgaatcgcttccttaaaaggatagagttcgacactgtccaaacgttcgcgcgtgaagggaagtatgggtagagctttatgcgaatcaacatcagtatctccatgtccggggaagtgtttgcacacagacaatactcctcctccttccagaccggaagcataagcgattaccttatcggcaacttgtatcggatcttctccgaaagaacgggtgttgattaccgggttcttcgggttgatattcacatccgccaccggagcaaaattcacctgcacacctatctgacggcattgacgggctacttcacgcccgtattcataaatcaggcgattgtcacgaatgcatcccaacaccatattccgtggaaacacaggtgtgccgcgcaaacgcatcgccaccccccattccccgtcaaaagtgatcatcacaggaactttcgcctgccgttgtgcccggttggttaactcaacctgattctgcatcttcccaccggaaaagagaagcccgccgactttataagtatcaatagcctcacgcaataactccaaatttcgcttggtgtttaccggagcaatggtatagataaacaactggccgaccttttctttaaaggataacttatccatcaccgaatcgacccaatgccggcaattcttatcctgctgtgctttatataagagcaaaggttcaacagaagcagcattctgggccggactcgaaacggatccggctaaaataaaaaataaaacaactaagataaagggaaatattctcatttacgtttcaaagtcaagttgagacgacctacccgaactccactttttcctgtgtgcataacgggtacctcttttccatccacattctgataattctccggtcctttcataaaagtgtgcgagtgtccgcccaaaattacatcgatattccgtgtttttgcaaccaactccctatccatttgaatgcctaggtgagacaggcatacaacgaggtcgcatcccttctctttcaacaaggcagctaccttgttcgacacttcaataggatcttcataaacaactccgacgcatttatttgcctgaatcaaaccttccggtttcgctccgagtccaaagacaccgattttcagcccaaaccgtttcagaataacgtatggctttaccaaatctttcagcaccgtagcgtccagattgtaattggaacaaaccaccgggaatttagccattttgaagagtaaagccatattgtccagatcaaaatcgaattcatgattaccgatagtcatggcattatatcccatttcgttcattaacttgacttccacttcgccacggaacatattataataaggcgtaccttgtgaaatatccccgcagtcgaacagcaacacatttttatgttccttgcggaactggtcgaggaaagtggcacgacggacaaaaccgccctcgtcatagttacggtcgcctttttgatttataggttcgatgcgactatgcacatcgcttgtctgcaaaattataatttctttggtatcctgtgcataagttgaaaagccgaaacacactacaaggcatacccataatgatagctgaaatctcttcatatcctatatttttagattctcctttttacttattttacggttatacgtccgtccaacttcgacgtaatgattttgccttccgccgtttgcttccgtacatagtccaaaaacaatccgcgtaaagtagcatcttccgggcattcccttttttcagcttgcaggaaagcatccatgcgtccgtttccgtctgccagatagtcgatagtagccacggtataaagctggtcatccactaccggttttccaccgatcgtagcattcagcaattctccttttttattgatttccaaacggataccgcttacaccttctccatgtaaagaagcaattgctttaaacagacgtttcatgtccgtacctttcatcgtcaagacgcacaatgaattttcaaaaggaagaatttcaaaaacagcacctaccgtgatgtctcccttaggcaggatattacgtaatccgcccatattgaccagtcccatatccgccggtttgcccaacacttgcgcggcagcttcttgcagcacgcttgccaccaaattagagagcaagctttcaggggtccccttatccattttcatttcactggtaccgatgacttcgtacatcatcgcgtctactttatccttgtagggttttaatacggtggtcgcttttttgtcaggattagcatcccaagtagagtcaatcgtaatcatgttgccctccaccttggatatttcatagcgggcggtagtttcttgtgctgaacgacaggaagtaaacaggaagcatcccgtcaagcctgccacagtcagtaactttacataagttcgtttcatgctcgttgttttttagatatgcgacaaatatacaaaaaacatttggctatctgccaaataatttgttactttgcaccgctttcgcgcaatcgctgtcaagagacgagatacttggtatgttgcgttgtaacgatgaaacaatttaataataacaacaatggatttaattaaaattgcagaagaagcattcgctaccggaaaacagcacccgagcttcaaagcaggagacactgtaacagtagcatatcgtattattgaaggtaacaaagaacgtgtacagttgtaccgtggtgttgttatcaaaatcgctggtcacggagacaaaaaacgtttcactgtacgtaaaatgtcaggaactgtaggcgtagaaagaattttccccatcgaatcaccggctatcgacagcatcgaggtgaacaaggtaggtaaagttcgtcgcgctaaattgtattacctgcgtgctcttaccggtaagaaagctagaatcaaagaaaaaagagttaacaactaagattaactttaagattcgagataaaaaaggaggtgtgtcaaaatgcgcaccttcttttttttaagcacaaagccccaactttcacaagctggggctttgttattacctaaagattttgtatctttaggcataagattttcactatgacaaagatacattttcgtccttacaattccaaccaaacagtgctttttcctcaaagaattgacgaggatattgcagagcatgatccagttcggatggttgacgctctggttgagagcctgaaccttgaaagtttcaggaagttgtataaggaatgcggccgcagcccttaccatcccaggatgatgctcaaggtcattctctatgcctatatgaacaacgtctactcctgccgtaaaattgaaaagctccttcatcgtgacatccattatatctggcttgccggatatgagaaacctgatttcattaccatcaaccgtttccgcaaccgggtgaaaaaggaaatcaacgaggtatttacccaaaccgtactccttctctcttccaaaggcttcatcaggctgaatgtggaatacattgacgggacaaagattgagtccaaagccaataagtatactttcgtctggcgaaaaacggttgagcggaactgtgaacgcctgatgaagaagatacatgtcctgttagggcagatagacgatgtcatcgcccaggagaactcatcggaaagcaatgaggagattgagttcactccggccatgctgactgaaatggctggagaattgcggaaagcacttgaacaggttcctgagccctccacgaaagaggaaaagactgcgttgaaaaagaaacgcaaacagctgaaggaactggaagaacacagggacaagctgcaggaatacgacaaccgtctgaacacgctacaggacaggaactcctattccaaaacggacaaggacgctactttcatgagaatgaaggaggatgccatgcgtaacggccagacaaagcccggttacaacctccagatcggcaccgagaaccagttcattaccgattttgcactcttcccgaaccctacggatacactgaccatgatacctttcctgcaatccttctcaagcagatatgacaggttggcccatacggtggtggccgattccggctacggttctgaggagaattaccgcttcatgtcagaaaacggtatggcgggctacgtcaaatacaactacttccacatggaacagcggccgagattcaaaccggacccgttcagggcggaaaacttctactacaatgaagaacaagacttttgtatctgccccatgggacagaagatgcaaaggatagggactagacatgtgaaaacagcatccggatatgtcagcgaaaatgccacgtacagagccatcagatgtgaaggctgtccgctaagatgccgatgttttaaagcaaaggggaacagaacgatagagttgaatcacagactcagaaaatacaagcaaaaagccaaagagctgctctgctcagaggaaggactgaaacacagaggacagagatgcatagaaccggaagccgtgttcggacaaatgaaaaacaatatgaattacaaacgtttccgccattttggaaaggataaggtcttcatggacttttccttctttgccattgccttcaatataaaaaagatgtgtgcaaaaatgactaaagaaggtatggattggctgattagaccgttttatgagcttacagttgctctatttagatgttgcgaacacataaaccaaagaaatcctcaaaatatcgcagcttaaaaaaatgagtcgatttttatagtcaatgaaaaaaaagaaggcgcatcgtgtattacgacacaccttcttttttatttcttagcctcacctctttttcctcacggtcaaggaattgttccccagtgagaaactgtaattttcccggtatataaaaagaaaatccccgaaaacaatagctcccggggattttcattacctttattataaaatcgatattattccttgatatcttttagctcccaagccaaagcactggcacccaatacagcagcatcagaatctttcagttcagaaacgagcaattttgtcttacctttataaatattcagtacattatcatcgattgacttcataatcggtttcatgatataatcgcctgatttagccaaacctccgaacaatacgattgcttcaggactggagaatgcaatagcatctgccaaagcttcacccagaatatttcctgtaaactcgaatatttcctgtgccagtttatctccttgtacggcagcgtcatatacatcttttgaagtgatactttctgccggaatgttacgaagcaagctggcatcagtacgagcagctagaaattcacgggctgtacgggctaccccagtagccgagcagtaagtttccaaacaacctttacggccacaaccacagatacgaccgtcacgacgggcaatcacgtgccccaattcaccggcaaaaccgtcatggccatacaccatttgaccgttgataacaataccgctacctacaccggtacccagggtaatcatgataaagtctttcataccacgggcagcaccataagtcatttcaccgatagcagctgcattagcgtcattggtcaaagccgtaggaatacccaatctttcttcaaacatagcagctaacggaagaatccctctccaaggcaagtttggagcgaattcaatagttcccgtatagtagttaccattcggagcacccacaccgatacctctgatcttatcgacaccgccattagcgataatcaacggaagcagattcttgcaaacttcgtcagcatattcttcggcagtaggataaccggcagttttgattgagctgctggcaataatagttccgcgtgcgtcaacaattccaaagacggtgttcgttccgcctatgtcaatacctactacgtagggcttttccatgtttgaattcatgatacttttatttaaaagggttagttaatcattaagtttactgcacacaaattacgtaaagaagattgagtctacaaaatgtttttagaaaaaagttcggccaccttgcaacttttcgtatcttgaagccgtctaatagtagaaatttattagaaaacaggaactaaataaagaaaattgtgatacaactaacggacatcaacaagacctacaacaacggagcacccctccatgtacttaaaggcattaatctcactatcggacgaggtgaatttgtttctatcatgggagcatccgggtctgggaaatcaaccttacttaatatattaggaatacttgataactacgataccggagattattatctgaacaacgtacttatcaaagacttgagcgaaaccaaagccgccgaataccggaaccgtatgatcggctttattttccagtcattcaacttaatttccttcaaagacgccgtagaaaacgttgcacttcctttattctatcaagggatcagccgaaagaaacgaaatgcacttgcactggaatatctcgaccgattgggactgaaagactgggcacaccatatgcccaacgaaatgagcggcggtcagaaacaacgtgtagctatcgcccgagcactcatcacccaaccgcaaattatcctggccgacgaaccgacgggagcattggacagcaaaacttcagtagaagtgatgcaaatcctgaaagacctgcataaaatgggaatgacgattgtagtggtcacccatgaaagcggagtggccaaccagaccgataaaatcatccacatcaaagacggtatcattgaacgaattgaagacaacatcgatcacgacgcttctcctttcggcaaaaacggtatcatgaaataaatcaaaatatactactatacaaacgatatcatgattgacatctggcaagaaatttatagtactatcaaacgcaataagctgaggaccttccttacaggatttgccgtagcatggggaatattcatgcttatcgtcctattgggtgcaggcaacggactgattcatgcattcgagcaatcggcttcggaacgggcgatgaactctatcaagattttcccgggttggacaagtaaatcctacgatggattgaaagaaggaagacgggtgcaactggacaataaagacgtagacgctaccaaccggtatttcccggatcatgtcatcaataccggtggaacggtatggcaaggaggcgtaaatcttagtttcgggcaagagtatgtaagcctgagtctttccggtgtatatcccaatcatacggaagtagaagttgtaaaactcttcaaaggacgtttcatcaacgagattgatatcagggaacgacgcaaagtgatcgtgctccataagaagactgctgaaatcttattcgacaagacccataccgatcctatcggacagtttgtcaatgccggcaatgtggtttatcaagtggttggactttataacgacaagggagacagcggagacagcgacgcctacattcctttcagtactctgcaaaccatttataataagggtgacaaactgaataacctcatcatgactaccaaaaatttggaaacaatagaagccaatgagaagtttgaaacctactaccgcaaagttttgggagccaatcatcgttttgacccgaccgaccatagtgcaatttggatatggaaccgatttaccaattatctacaacaacagcaggggtcggccatgctccgtatagcgatttgggttatcggtatttttacattactaagcggaattgtcggagtttccaatatcatgttgattacggtaaaagaacgtacccgcgaatttggtatccgcaaagcactcggcgccaaaccgctttctattctttggctgattatcgttgagagtgtcactattaccacaatattcggatatataggcatggtggccggtatcggagcaaccgaatggatgaacaacgctttcggcaatcagacaatggataccggaatgtggacagaaacggtttttctgaatcctactgtcgacatcagaatcgccatacaagctacactcacattaataatagctggaacattagccggattgttccctgcccggaaagcagtcagtatccggccgatcgaagcacttagagcagattaagattatgagaatagacatagatacttgtgaggaaatcctcatcactatcacaagaaataagacaagaagtctgctgactgcattcggtgtgttctggggaatttttatgcttgtagcccttattggcggcggacagggactggaatatatgctaaaaaagaactttgaaggatttgcgactaactccggtttcctagcttcacaaaggacaggagaagcgtataaaggttttcgcaaaggaaggtggtggaatctggaatctacagatatcgaacgccttcgttcgcaggtcaaagaagtggaagtcattaccccctccgttgcacgttggggatctaaagctgtatacgaagataagaaatatgattgcagtgtaaaaggactataccccgattatctccacatcgaatcacaggaaatggcgtatggacggtttatcaatgaagttgatatacgcgaagcgcgaaaagtttgtgtgatcggcaaacgaatttatgaaagccttttcaaaccgggagagaacccgtgcggcaaatacgtgagagtagacgggatttattatcaggtgatcgggatgtcttcttccgaaggagatatgaatatacaaggaagagcttcggaagccgtcactctacctttcaccaccatgcaacaggcttataatctgggagggcagattgatgtagtatgcttcacagccaaacaaggtgtcaaggtgtctgaactgcaaccgaaaatggaacagattatcaaagctgcccattatatcgcccctaacgacaaacaagcagttatgtatctgaatgccgaagcgatgttttctatggtagacaacttattcaacggcattaatatattggtctggatggtaggattaggaacgttactggcaggtgctatcggtgtatccaatatcatgatggtgaccgtaaaggaacgcacgaccgaaattggtatccgccgggctatcggagcacatccgaaagatatcctgcaacagattctatcggaaagtatggtgctcaccacgattgccggaatgttcgggatttcttttgccgtaatgatattgcaagtagcagatatgctagccagttcaaacggaggagacagccattttcaagtcagcttcggattagcggtcggcacttgcgcacttctggctgcattggggatgttagccggcctggcacctgcttatcgggcaatggctatcaagccgattgaagcaatcagagatgagtagaagttgagtattgagaaggaagagttgaaagttgaataaagaattaaaaattaaacatatataatcaagatgaaaaagtatctgaaaatcgtattattggtaattgttgccataatcctcgtcggaacgttcgtattcctttatcagaagtcgcgcccgaaggttgttgtctacgaaaccctcaagccggaagtgactgatctgcaaaagaccaccgtagctaccggaaaagtagaaccaagagatgaaattctaatcaagccccagatctcgggtattattgacgaagtatacaaggaggcaggacaagcagtgaggaaaggtgaggtgatagccaaggtaaaggttatccccgaactcggacagttaaactcggcagaaagccgtgtccgtctggcggagattaatgcaacacaggcggaaacggatttttcccgcgtgaagaaactgtatgaggaccaactaatcagccgggaagaatatgagaaaagtgaagtagccgtcaaacaggcacgcgaagaaaagcagactgccaaagataacctggaaatcgtaaaagaaggtattaccaaaaacagtgcttcattcagcagtaccatgattcgttctactatcgacggactgattctggacgtaccggtaaaagccggaaactcggtgatcatgagtaacaccttcaatgacggaacaactattgctacggtagccaacatgaatgatttgattttccgtggtaatattgatgaaacagaagtaggccgcatccatgaaggtatgccgcttaagttgactatcggagctttacaaaatctgacattcaacgcgatattggaatatatatctcctaaaggagtagagactaacggagctaaccagtttgaaattaaagctgctatttcagttccggactccgtacaggttcgttccggttattcggcgaatgcggaaattgtattgcagcgtgccaataaggtactggcagtacccgaaagcaccgttgaatttaaaggtgattctacatttgtatatatcatgactgattccgtacccgaacagaaattccaacgtacacaagtgaccacaggaatgagtaatggtatcaaaattgagattaagaaaggggtgactgccaatgacaaaattcgcggcgccgagaaaaaagacaaataattcattttctatgaaaacaatctataaaaccatagctatctttctactcgccggaacaggagtagattccgcacaggcacagaacggttcttcgcaaacctggacgttgcggcaatgtattgattatgctatcgagcataacatcaatattcgccagacagctaatgaagcagaacaaaataaagtggacgtaaatacagccaaatgggcacgcctcccgaatctaagcggaagtgcgagtcagaattggagttggggacgtagtgcctcgccggtagataactcctacagtgatatcaacagcgcgaatacgagcctcagcttagggaccaatgtaccgatttttacaggtttacagttatcaaatcaatattcattagccaagttgaatcttagggccgctatcgaggacctgaacaaagctaaagaagatatagccatcaacgttacctctgcttatctgcaagttctatttaacctagagttaagcaaagtcgcctttaatcagacgaacttgagcaaagatcagttgaaacgcatcaaaggactcttcgaagtaggtaaagcctcaccatcggaagtggctgaagcacaagcacgtgtggcacaagatgaaatgacttccgtacaagcggacaatacatataaattatcattgctagacctcagccaactgcttgagttaccgactcccgaaggtttcattctcgaaaatccgaaagaagaactggaattcgaagcgctaactccgccggatgatatatatacacaagcgcttgcctacaaacctagcattaaagcagcggaatatcgcttgcaaggtagtcagaagaacatccgtatcgctcaaagtaatttttatccgcaattatctttcagtgccggactcggaagtaactattatacagtgagtggtaaatcagagggaagtttcagcagccagatgaaaaataacctcaacaaatatatcggatttaatcttagtgtccctatctttaaccgtttcgctacacgaaaccgtgtacgaaccgcccggttacaacaagcaaatctcagtttgcaactagataataccaaaaagattctttacaaagaaatccaacaagcctggtacaatgctctggcagcagaaagtaaatataactccagtgaagtggcagtgaaagccaatgaagaatctttccggttaatgagcgagaaattcaataacggtaaagcaactttcgtggaatataatgagtcaaagttgaatctgactaaagcactctctgacaagttacaggctaaatatgattatctgttccgtactaaaattctggatttctataaaggagaaatcatagaatagaaaacgccattgagttttttacaagaaatacttcaaacatatccgccggttcattcgttactatagaaagaaccaacggatatgaaacactttatcatcgcagcagaaatttatcttgcaggaggatgtttctggggaacagaacatttcctaaaacaaatcagaggagtagaaagtaccgaggtaggctatgccaacagtattatcaaccagccgacctatcaacaggtatgttcgggagaaaccaatgcagctgaaacggtgaaagtagtctatgaccccgaaacagttaatttaagtctgcttcttgatctgtattttaaaacgattgatcctaccagcctcaaccggcagggaaatgatcgcggtacgcaatatagaacggggatttattatactaataaagcggatatcgctattatcaatcaggctgtccgggcattagcggatcaatataaaaatcccattgccatagaagtaaaaccattgacaaatttctatccggcagaaaactatcatcaggattatctggataaaaatccgaacggctattgccatatcaacccggctttatttgaaatggcacgcaaagccaatgctcccaagtccaaagtttatcaaaaaccggatgacacagtccttcgccaacaattatcggcagagcaatatgccgtcacccagaaaaatgctacggaacctgctttccggaatgaatactgggacgagtaccgtcccggtatctacgtagatatcaccaccggagaacccctatttgtttcgaccgacaagttcgattccggttgtggctggcctagtttctcccaaccgattcaaaaggacttgattacagagaagaaagatacttcttatggaatgacacgtaccgaagtacgcagtaaaaccggaaacgcccacctaggacatgtatttacggatggtccgaaagaaaaaggaggattacgttactgtatcaatagtgcttctcttcgttttattccgaaagaaaaaatgaaagaggaaggctacggagaatacttaccgcttatcaaataaaaaaagaacggcggactgtccttcaaaggctgtccatcacgtttaatgcatttttttacctacctttgtatccgataattaaaaggtaaatgatgaaaacaaatagccaaaagcgtattcttccgctagctctcagtggaggaatactcatctgcctcatttgtatctactcaggtcgcagcgttcttctacggagcatagtcaaccgacacacatcccgtatcgagcagacacacgggttatgcattcattacgacaaactggagatgaatggtttaaatgaaatatctctccaaggcctttcggttatccccgaacaacgggatacactattcacgttagcatcaacccgcatcaagttgaatttttggaaattactcaccaagaaaatagaagtaagctacatagcagcagaagatatcagactcacatttacaaagcaagactccatcgccaattatgattttctctttaaaaaagaccggaaagttccatcacaaacatccggtcaaaccgtaacggaaatcaattatgcggaaagaataaacaaactactcaatttatgctacggttttctacctgaaaacggacaattaaaacagatttatatcactgaacgaaaagacagcaacttcgtttctatggtattcccttcttttatcatcaaagagaataagttccggtcaaccattgagatacacgaagatacactaacccggcattggatagctgatggcgaactgaaacaatctgccaatacattaatggcaaagctatactctgccgattccacaaaagtttctataccttatattacccgccgttttggtgcgaaagtcacttttgacaccttatcttatagcatgaccaaagaaagtaatggaaaaaaccagctatatctcaacggaaaagcgaaagtaaacggacttgatatattccacaaagtactgtctcccgaagtgattcatctcgaccgcggacatttaggatatcaaatgaacattagcgaccattcttttgaattggatagcaccactacggttatattcaataaaattcaggttcatccttatctacgagccaaaaagaaaaaagatttatggcatttcactgcagccgttgacaaatcatggtttccggcagacgagctgttcagttctctgcccaaaggcctgttcaacaacctggaaggtatcaaaacaagtggtgagttagcttatcatttcctgttggatattgattttgcacaattggatagtctcaaattagaatcagagttgaaagagaggaatttcgaaattgtagaatatggcgatacccaactgtccaagatgtcaggcgagtttgtctacacagcatatgaaaatggaatgccagtacgcactttccccgtcggcccttcctgggaacatttcaccccacttgacagcatttcaccgatcctgcaaatgtctgtgatgcaaagtgaagacggggcgttttattatcatcatggtttcctgcccgatgcactccgcgaagcgttgatttacgatttgcaagtcaaacgttttgcacgtggcggaagcactatcacaatgcaattagtgaagaatgtatttctgaacaaaaataaaaactttgcccgcaaactggaagaagcattgattgtatggatcatagaaacaaagagactgacttcgaaagaacggatgtatgaggtatatctgaatattgcggaatggggcccgctaatctacggcatccaggaggcttccgcctactacttcaacaaacgtccttcccaactgactacggaagaaagtatcttcctggcttctatcatcccgaagcccaaacatttccgcagttctttcgcagaaaacggaaaactgaaagagagcatggaaggatattataaactcattgccggatgtcttgcccaaaaaggtttgataagtgaaatcgaggcggatactatccgccccgaaatccaagttacgggcgatgccctgaatagtctagccggcaaaacaccggagtctagctctcctaccgctgaggagcaatgatataaataattaaaggaataggttatcttcttgaattggtgtctcgctctgaagaacgggaagaagaacttcgactgctgcttctcgtactttcggaagaggaacgtctttccgtttttccaccggaaacattgctccggttagaactactgctacggctcggaccggaagtactgctactgcgaccggaactgctgccccggctagtggaagtgttacttctatcggaacgattatttctaccggacgaagaactactgccgctactggacggacgactatcatttcttctacttgtactcgagctactactctcacgattaggacggcttgctgtcgtactgctacctcccgtcggtctacggtctgattcaggacgaactgatgttgagggccgtgaagaactgccaggccgcgttgtcgttccaggtcgcgttgccgttccgggacgagttgatgttccgggacgagttgatgttcccggtcgtgaattatgactcggacgctgtgatggacttggacgtcccgttacccccggacgagtcggtgcattgtgcggacggacggaagaattcgggcggaaatgaaccgaaccaaaatccgaacgacgataagaatggaaagatctctgctctcttacccgatacggagtaggataatgtctgaaattatatctgtcccgatagaaacttacgtgatgaaggtgcgggcgataatgtgctccacagtaagtccgataatgataaggcagaccgaagtagaacaaactacgattcggataattcacataaacccggaaactccatcttccgccggtaatataaatcgggcggtagaaataatcagctcccagaaaccgacgatactgtgcgtcactcaatacccaccggaggtcatcattacgaatatccaaagcttcataataatcatctaatgcccattcatagccacgggccacataatccatgatattacgaacagaataaataaagtcgtaattaatctcatacgcatcattatattgctgagtgctcaaactcaattcgtatgccattttatcagtaagaaagcgtgtttccttacgcactttgctagtgctcattccagccatcgctgtcgtaccgacagtcagcccgatagcaaagagtaaaaataatattcgcttcataatttaatctcctatcatttatttgtttgatgatattctttgataaacttgtacatttcatctttatacacagtggaaaacaagctatcaatcaccttattaaaattctgcttatcccttacataaggataaagtttcttcatcatctcaacctgatcgggcgtataagaaatctcttttacaattctcacacattggcttgaagtgacatcatgcttgtccaacatctgtccgatcaacctcttctggtcatcactcataattgtgaatttcaacttttcgatgaagttattaaactcagtatccgtcatcagacgaatttcttccggctggtgaccgggaacaacttcaacagtagtgacagtagtaggaggaggtactacgaccggatgcggcgaaggtctgccatagcctttgaatgtatccatactgatcacctttttattggcaaactgaacaatgattgtcatgggctccgaagtcaaaacaggcgtcccgttatcacgatgaaattcccattcttccatatcaccgtcgaaacgtcggtaatccggttttccaaaaatactttcaacatctctttgagtcatcccttgctgtacacccataacctgcttgttagaaatatagctggtaaaacagctgctgactcccagtcccaatgccaacagtaggatgatatgtatctttttcatagccatatagttttaatagttagtatcagcgtctgccatagttctgcacaaacttattcatttcatccttattggaagaaaacgtcagtgtagcaatcaccgtaaagaaagcctccttgtcaacaatccggggatacatctttttcatgattgccattcggtcatcatcaaaagtatagagctttgtcacttggagacattgggcagacgtaaaatctgaatttgccaatgcagtattaagcaatgccatgcgatcatcctcaaacggttctttcttcagattattatagaacgttttaaaaagctgatcgttcatcaccctgtcgtgacggtcataattcggacggtgttctccttgtcccggtctgcccggacggacattggcatgacggtcatctacaaaaatatctttcacacctcttccgtcgaagtaaatacgttcgttgtacaacctctcccctttccaaacacgctctcccggacgggtgaaacgggtagcataaacctcaactgtgtaatatccccgatccaggttagctacaaagcaagtggtagtcggcaagcacatctggtttccaccaaagtaaacaagaataggggtattaccaccgtcaatacggattccgctgacggactgcgcttgtaaagagagagcggataacaggatgcagaaacttattattatcttacgcataacttatctagtttttattattacttctttatttaatctgatactacaaaaatagggcgaggaaactccccaccccagtgattctctctattcatacatagggatttccctattctgattaggagtctgccaaagtgatgccatcttcgtgcaaggttatcaggtgtttcttatataagtcacccactcctttcttaaaggtcttcttgctgacaccaaatgtagcataaatatcttccgcaggacttttatcattcagtctgatccttccgtcattctccctgatataattcagcaaggttttcgagaaatcatctatcttctcaaagcctggtttctgaaggatcaaatccaccttgccgtcttcgcgcacctgtttcacaaaagccttcatctccatacctgtctgcaatgtagaaaatatctcgttttcgtaaagcaaaccgctatacttattgtctatgattgccttgaagcccaaatccgttttctgccaaatgagaatattcacttcatcccccgaagcatactccggcctgtctttcgacagatagcgttccacctttgccgaagccacaatgcgataactttcatcatccaaatgtgcatgaatcacgtacttccgtccaacctgcatcttcatcttctgctcactgaacggcacaaacaggtccttcatcaacccccagttcaagaaagctccaaactgattcacccatgccacttccagacaggcaaactgccctacctgcaccaacggagtcagcgtagtggcaatcaatctctcatccatatccagataaagaaagacattcaaaaagtctcctattttacagtcttcgggcacataacgggtgggcaacaaaatctccccctcctctcctccgtcgagatacaccccgaaatcgacttcctttacaacttcaagctgattgaattttcctaattcgatgctcatatttatccatttatataatataggatacaaagataatctattttagacagatccttcaatcagccagctataacttttcgttatctgataaaactattttcaatgaacaatcaggtcaataaagtgttaactttgtagcgacaaaaagaaataacagattattcacctttaaatagatagctttatggaatttttaaccaacgagaaacttacaattgtaggagcagccggaatgattggctccaatatggctcaaactgccatgatgatgaaactcactccgaatatttgtctgtatgatccgtttgctcccgctttggaaggggtggcagaagaattgtaccactgcggcttcgaaggtgtcaaccttacttatacttctgatatcaaagaagcgttgaccggagcatcttacatcgtttcttccggtggtgcagcccgcaaagcaggtatgacccgtgaggacttgctgaaaggaaatgcagaaatcgccgctcaattcggtaaagacgtccgccaatattgcccgaacgtaaaacatattgttgtcattttcaatccggccgacattaccggtttgattaccttactgtattccggactgaaaccgtctcaggtttctacgctggcagcattggacagcacccgtctgcaaaacgaactggtgaaatacttccatatcccggcttctgaaattcagaactgccgcacatacggcggtcatggcgaacaaatggccgtatttgcttctaccactaaagtgaaaggagaaccgttgactgatttcattggtacgacccgtctcccattaaccgaatgggaagaactgaaagtacgtgttatccaaggtggaaagcacatcatcgatctgcgcggtcgttcttctttccaaagccccgcctatctttctatcgagatgatcgctgccgctatgggcggacaacctttccgctggcctgccggaacgtatgtctccaatggaaaattcgatcatatcatgatggcaatggaaacttcaatcaccaaaaacggtgtcacttataaggaagtagccggaactcctgccgaacaggctgaactggaaaagagctacgaacacttgtgcaagctccgtgatgaagttattgaaatgggaatcatacctgccatcaaagactggcattcattgaatccaaacatcgattaaacaagcatattgataaaaagccggaactctaccgatatttctattggtctgagttccggctttttctatttattcattctttgaatgagaagcacattccggacaaatccccttgagaacataattaatgctatgtaacgtgaatcctttaggcaaatcaataaccggaatatgtgtaccttccagacaaaaagtccgatgacatttctcacaatagaaatgcgagtgtaaatcctgcaccacgcagttacaggagttgtcgcaaacggcatacttcaacgaaccgcttccatcatctatgctatgtatcaggtgatgagacagaaagagagctattgtccgggatatggtcgatttgtctaccgtatccaggagagtttccagatccagtaacgatacggcccgtccaacttccaacatatttttcaatatgagaagccttattgctgtcggtttgatatcccgtctttccagcttatccaaataaacattctcttccatattctttttattttatcatcttctgtattctcactgcattcataatggcaagcaatgcaacgccgacatccgcaaagacagcttcccaaagtgtagccagtccgccagctcccaagataagtaccaacagtttcactccaaatgccagcgacacgttctgccagataatccggcgagtcagctttcctactttaatggcttcggccactttcgacggttgatctgtttgtatcacgacatcagctgtttcaatcgccgcatcactgcccaatccacccatagcaataccgacatggctcaacgcaagcacaggagcgtcgttcatcccgtcaccgacaaaggcaatctgatttgcttcattcttccacaattcctccagatgtttcactttaccgtcaggaagcagatcgccataagcctttgatataccgagcttctctgcaaagttagtaacaatactctgtttatcaccggataatatctgaatgttttcaatgtttaatgcttttaagttatcaatcgccgtcttcgcgtcatccttcaatgcgtccgccaacaagagataacccgcataactgcctccaatagcacaaactacaatcgtatcggtaacactctgcaattctgtcggatattttatgctaaacttagacagtaaccgactatttccaacgagcaccgaagtcccgtctattattgcctccaaaccgagacctgcaaattctttagtattggtgacaaccgcaagccctatatcctgcagttttgcatagttcacaatcgctttagcgatcggatgtgtactgtcactttctactgaagcaatcatcctcaccagttccttctccgaaatcccagatacacacttacaatcctgcacctcaaatgttcctttggtcagcgttcccgttttatcgaatacgactgtattgattttagtgactgcatccagataattgccgcctttaaacagaatccccaatcgggaagctgctccgataccaccgaaataacctaatggaatacttactaccagcgcacatggacacgaaattaccagaaaaaccaaagctctgtataaccaatcattaaatgtaaacacgaattgagggtctatcaatgaatagccaaacgggagcagcacaatcaataccgccagtgctatgacaataggagtatagatacgggcaaacttacggataaacaattctgccggtgctttccgttccgaagcattctgaacgagttccaatatccgtgcaagcgcacttttatcgaaaggtctttctactttaatcctgattactttatccgtcacaatcatccccgcaaggacttcctctccttttctgatgtcacggggaacactttctcccgtcaacgcggccgtattaaaagcagcgatttcattcaacatcactccgtccaaaggaactctcccacccgcctttatttcaatgacctctcctacttttacattttgaggactttctaccacaagattatcctccctaagcaccaaggctttctcaggtctcacatccagcaaagcaccgatattacgtttcgccctgtctaccgctttattctgaaacaactctcctatcgtataaaacagcattacagcgactccttccggatactcaccaatataaaaggctcccagcgtagcaacaatcatcagtgtaaactcgctgaagtagtctttttccctgataccctcccaagcctctttcatcactggtattcctaccggaagataagccaggatataccatattaaagcaacatactctccaaggaaaaaggcaaaattcagggcattcattataatacctcctatcagaagtataaatgaaagccctactttccagtattcgtgaactatcgaagtactggcattctttttattttctgtcgtgcatgaatgtgcaccgcaacaacaatgtcccatattcattcgttttttatctgttgcaaaggtaacgaatgattcgtgcaacaaagttgcaaagtccgttttagaacatataaccaaatgatatcatcaggttcctgtttttcatacccaaatctttctgcacgtcaatcaacccgaaatcataactcaaagcaacctgatattttttgttgaactcaacaccggctttcaatccgaggccgaagtcgaatcgtttgaacccgtcatcgccaaatatatcttcagatacagatttaccttccaggcctcctacactttccataccttctatatcagcccaatcaccaatcgcattgcctatgctcaattttgcttttccaaacagaccgacagccaaataaggacctacgctaccaaacagcgcaaagttttcatttacagcatatttataaccaacatgcaccggtatctccaaataatacggattaaatttaacggttgcaattgatcctccatcaattttagcacctttcaacgtcagtaacgcagcaaaatccatgtatgccccacttgcttcctgcgataaccccaactcagctttgacacctgcatgaaaacctaccctgttgtcaaaaccggtaaaagtatatttactcacattcatacctgccataacaccccatttcaagttgtcctgcgcatttacactcaccatagctatcgctgttaaagcgaataataccagaatctttttcataagaatgaataatttaattattgtttagaaatcatgtgctgcaaatataagaaaaacaaggttcaatatatccggtaggacgaataaattcgctacataaaatacgtatctttaagataacattaatatagctccacattctatataaaagtattaaaatccaagtaaaagaaaaacatatttatagtaaagacagcgactacacatacatcacgtaaagcaatagatatttatatattacgttacctacatccttatcatatctcgtcttcatccatttatgttcttatctcatcttctatcgttccactcaagtagacagatctatgcactccagtagataaatcctgccactccagtaaacaagcctgttcactaaagtagaacgaataagatatcacttaaaagacataacattagttagtgaataattagttattacttaatgttttatatgaaaacaataggtatcctccagatacaataagcttggttaaatactaccgaaaggatttattaccctatgagaaataagagaaaatagtatgagaaatgaaggaatttgaagagaaaactatgagaaatgcatgagaaataccaattcaaaaaacatttctcatagcggtatcttactaataatcttacatttagccactaggttatgagaatatgagaaatgaaaacaaaaaactgattcttcttcaaatttggtggtaaaattaattaagaaaataataatttgataatcgatagtattcaacattctcctccttcaggaaggaggagtccccgtagggggaggtggtaggtgaatgcgtaagtcggttattatcagcattgtgtatctgcctaccaccccggctttcagccacccctccttccccgaaggaggggaatggagataccaccgactgattaaattaccaccaaatttgaagaagaaccaaaaaacttttctagtaacagaagacagaaattactccaaacgaatttaaagcaacttctgtccttagaatattaatgagtcaaattaaagctcctattctttacgatcagtctgaatcaaagataatagtttgtctaccgcctcttcttcaggaatattcttttccacgcaaaccttacctttatacaggctgattttgcctcgtcccgcaccgacatagccgtaatcggcatccgccatttcaccggggccattcacaatgcatcccattataccgatcttcaaccctttcaagtgtgaagtggcagctttgatgcgagcgattgttttctccaaatcgtagagcgtacgtccacagccgggacaagaaatatattccgttttggaagtacgggtacggccggcctgcaagattccgaaagcggttgcatcaacgacaacatggctcaggcccccttgattgaacaagaaaattccgtcgcatagaccgtcgaaaatcagcgcccccatatcggcagcagactttatctgtaaatcttcggcattatcctccgcataatgctggaagaaaacaaccggattctgcaatccttccgtcataagttgatgtaccagggcacgatgttcacccaaacggttcgggtgattgctttgggaaacaactacaacttccggatgctgtttcaagcaggcaatcacttcatccgtctgtgccatatagggcataaacaggaatttaagttctgcattgcagccgcccattaacggcagttgcgcgtgattgtaagcaggccatgttccggattctcccacccacacatcggcatcgaggatatattccacgcccgtttcacgttgttcgggcagtgctcttccggcataaatatagtccggtgtgaactgcggatttacttccgtttttccatccatgcggtcggcaatgactaccggcacgtgttcgcctcctatattgcggacagcctttgtctgacgacgcgagggagacagataatcaaactccggtgcctccagtcctgggatatacggatgctcctgcctcaacaggatgtaatccaccagtttacgggcaaccgggatttcggcttcgggagcctcgctcaaagatacacgaatggtatctcccaaaccgtcggacagcagtgcgccgatacccaaggcggatttgatacgtccgtcttcaccgtctccggcttccgtcactccgagatgcagagggaaagccatgccttccttttccatgacagcgaccaacaaccggacggtctttaccattacgaccgtattggaggcctttatcgaaatgacaacatccgtgaaatgttcttcaacacagatacgaagaaattccatgcaggattctaccattccttccggagtatcgccgtagcgcgacatgatacggtcggacaacgatccgtggttcaccccgatacggatagcagtatgattctctttgcagatattcaggaacgggacaaaacggtcacggattttctgtatttcctgcgcatactcttcgtctgtatattccagtttcttaaaagtacgcgcagcatctacgtagttgcccggattaatccgcaccttctcggcatattgagccgccacatcagctaccttgggattgaaatgcacatcggcaaccaacggcaccatgtacccctgactgcgcagaccgatattgatgttcatcagattttcggcctccttgatgccttgcgttgtcaggcggacatactcgccacctgcatccacaattcgcttggcctggtccacacaagcctgtgtatcctgcgtagacgtgttggtcatcgactggatacgaatagaattggggccgcccaacggtacagccccaatatttacttctgtggtttctcttcgaaaataattgaatagatccattagttcgttttatattcaaacttcacttctttcagttcttcgttcgcttttacgattttcttcttcaaaccttccttgtaagcagcaaaagcttccgccaacttttcatcactcaatgcaagcatctggatagccaggatagcagcattcattgctccgttaatagccacagtagccactgggattcccggaggcatctgaataatcgaatagagggcatctacaccgtcaagcacggaacctttaacgggcactccgatcaccggaagtgtagtgttggccgcaatcacaccgggaagggcggcagccattccggcagcagcgataattactttaatgccacggttgcgggcattcttcgcaaactcttccacagcctccggcgtgcggtgagcagacagagcgttcatttcgaacggtacatgcatatcattcagcagttgtgccgccttttccataacaggaaggtcggacgtactgcccatgatgatacttacaattggagtcatgttaattactatttaccagttacaaattacagttttacagtgacgggacttttatccgtttactactgctttatatgcttccgcatccagcaagtcttccactgctttaatatcttcaggcttcaccttaatcagccagccttcaccgtacgggtctttattaaccagttccggattttcttccaacgcttcattcagttcgatcacttcaccggccaccggcaagaaaagatcggaaattgttttcactacttcgatagtaccgaatacctcaccggcttccaacgtttcaccgacagtagggatgtctacaaatacaatatcgcccaactgttcttgcgcatagtctgtgataccaacataagcaatgtctccttctacgcgaatccattcgtgttcgttcgtgtacttcaaattctgtggaaagttcataataattagtttttaggatttatactgttgttaaaataaaaatactcgaaataaaaggttactcaccggatgaagcaccagcagagcagctaccagaccgaccgtaaagccggaaagtacctcacccaatgtatgatgtcccagaataatccgtgcggaacccagtatacctgcaatcaggataaacaggcacaaccatgctacgggattataaccgaacaacgcactgaaagagaccagtcctccgatcactccacctattcctgccatatgctcgctcagtttccatttcaggttgacggcaatacaaatgacagaaactaccagagatgccagaataatgcctgtcatataccaggggatattcagcttgcgcatcatcagcaggcagaatacatacgagatgatagtcagcaggataggtacataacgtttcttacgttcgctcaattcctgacgggcgaagccattaatcttacgaaacaggaagatagtaatggtaggcgtcagtatggtaaagcaataaacaattcccaacacaatcaacttatattgtatcggcatgatacgaagataagaaaaaaggaataacaccaaaaacgacaaaaacggaatcgaaaatggagtaaacaccattgaggtaactctcgctacccgcaacatggtcttatccgctatgatatgctctctttctttatccactcttctttttattactagttatttattacaaaatctcaactctcattttcatgttacttcttcctatcacttccgaagtctcgctacaggaatgttcagttgctgacgatacttggctaccgtccggcgggcgatagggtatcctttttcttttaagatctccgccagttcgtcatctgtcagcggtttcttcttgtcttcgctgtcgatgcactctttcaggatcttgcgaatctcacggacagacatttcttcgccgtcttccgttgtatatccgtcaacgaaaaagaatttaagctgatagataccaaaattcgtctgcacatatttactgttgctcacacgggaaatggtagatatatccagtccggtacgttcagccacatctttcagaatcatcggtttcaacaaagattcgtctccttcgaggaagaagggacgttgcaggtcgattattgcctgcatggtagtcatcaacgtattctgacgctgtttgatagcatcaatgaacccttgtgccgcatccattttctgcttgaggaacatcatggcttcttttgattcctttgtctggttgaacttatttttagtatgttcttccaccatttccgtgaagtcacggctcatacgaagctcgggaacattacggttattgagactgacattgattgttccgtcatcgtatgtttccacgatgaaatcgggaatgatctgctggaagtttctcccgatagtttctcccaaagaggcaccgggacgcgggttcaacttggtgatttcgctgataacttcattgaacgtatcttcgtcgacatccagtttcctgatgattttctcccaatgcttgcgggtgaattcttcataatagtctctgataacacgttcttcgagttccaatatagggttgggggtccgttcttcatccttcttccggcagatctgtaacaacaggcattcctggagagtacgggcaccgattcctgcgggatcaaagtcctgcaagatgcacaatgcttcttccagttcttcctcggtggattcaactccggcatagatggccagttcgtcacaaatgctttcaagtgatttgcggagcagtccgtcgtcgtctaatgaaccgatgaggtattccaccagttcattctgatgttctgtcagattgcgttcaccgagttgctccttcaatatttcataaaaggaggtagattcggagaagggaatattttccggctgatcatcttgcgaacgattgttctcttgcagtttatagtcgggaatatcgtcctcggtgaggtagtcattcaaagaatcatagtcggtggatgcattatccatgccatcttcagaaccttcaacatcggaatattcgtccgctgcggattcttctcttccttcttcgagtgccggattttccaatagttcagcatggatacgatcttccagttctactgcgggaagctccaacagtttcacgaccagaatctgctggggcgagagcgtttgtacctgctgttgcgcctgcgattgtatttgacgggaaccttgtgccatattcgtttttgctttctactgtttctcgctacaaaagtaactttttaactagagattacacagattagggagataatttttaatcctataacacaaaaatcgttatctttgttgcacgaacttaaaaattaagacagtatgtttgccaaagaaacgtatatgcagcgcagagccctgctaaaaaagaatttaggctccggagttttgttatttctgggaaatgacgagtgcggactgaattatgaggataacacgttccgttatcgtcaggattctacattcctttattacttcggactttcatgcgccggactttcggcaattattgatattgatgaggacaaagaaatcatttttggtgatgaactgtctattgacgctatcgtatggatgggatcgcagcctacgctacgcgaaaaatacgaacgtgtaggagtaaaagatataatgccttcggccgacatcgtcggttatctgcataaatgtgtgcagaaaggaaaggcgattcattatctgcctccttaccgccccgaacataaactgaagctaatggattggctgggcataccgcctgcacgtcaggaaggctcggtgccttttatccgtgccgtaatcgcacaacgtaattataaatctgcggaagaaatcgtagaaatagaaaaggcgtgcgatgtgacggccgatatgcatatcacagcgatgaaggtactccgcccggggatgtacgagtatgaagtggtagccgaaatgaaccgggtagcgcaagctaacaactgcgaactttcttttgccactatcgctactatcaacggacagacgctgcacaatcattatcacggcaatctcgtgaaaccgggtgatttgttcctgattgatgcgggtgcggaaattgaatcgggctatgccggcgatatgtcgtccacggttcctgctgacaaaaagtttactacccgtcaacgcgaagtttacgaaatacagaatgccatgcatctggaatcggtcaaagcgctacgtccgggcattccttacatggaagtttatgaattatccgcccgtgtaatggtagaaggaatgaaggcactggggctgatgaaaggaaatgcagaagacgccgtgcgcgagggtgctcatgcgttgttctatccgcacggattaggtcatatgatgggactggatgttcatgatatggaaaacttgggtgaaatctgggtaggatataacggacaaccgaaaagcacgcagttcggacgtaaatcacaacgtctcgccattccgttggaaccgggatttgtgcatacggtagaaccgggtatctatttcattcccgaattgatagatatgtggaaggcggaaaagaagtttgccgatttcatcaactacgaaaaagtggaaacttacaaggatttcggtggtatccgcaacgaagaagactacctgattacggaaactggtgcccgcagattgggtaagaaaatccctctgactccggacgaagtggaagctttacgataagcaaaaaattaatcacattaacactggcttctcagacaaccactagaatgacggaagtttttcattaataccggaaaacctccgtcatttttataggagtgcccaaatgaacagtttcataaagaaacgacctttattcgtcccaatcggataaaggcaacgtctttttaccgtaccatttcatccatgcataagattttctttttcttaaataaagcgtatcaccacaattttctaccgcttcccagttgaatacagaatgagaacggaatgctttttccaaccaataaagtatgtcataggtaacgaaaggaactatcatccaccaccacgaaagccacaaagacaaaattaatgccggagctaaagtcaaaaagaaacattcccaatattgccttgcatgtatccgtaattccatatcttcccaaacttctaaatatttatatcgggtaaagaaaagcccgcctaccataaaataatgcttctttttccctaagaaccattttgccaaaagattattataaaaaatcatattcccgttttttttgttgtatgtaatatcttcataacagaataaatacccaaaggttcatttattcaagtgccatataacagttattgaccctctcgtctgaataattccaacgaatttaattattgctgtttcgtattccaacctgtctgaccctaacagacaggttaggataattacgcaaagtaaattgaaaaaacgaatatatcctaattttcctacttaatatttaaagctgcttcctcctaaaaattcccgaagcaaagaagtcggtggtatttctttgtcttgaaccggaacaaaatatttgatgaatttcaacaaacgataggcttcgcagtattccgggcaattacgcggaactcccattaatataggttcagcgtgcaggcggagcactgcaaactcaaaaagaagagctgaattgaacattacatctgcattttcctgataagggaatatccacttatcttcaccggcacgcacactaggccaacgtgaaatggtttcacgggcagaatagccccgataattgaaatcacggataatacgacgcaacagacgattgtcggtagtaggaatccagttgtggtcgtccagagagatagtggtcaatgccgatacataaatcttaaatttacgttcggcaggaatatgtggcgtcaactccggattcaaggcatgaataccttccaatatcagaatcgtgttatcttcaattttcagtttatcacctttaaattctttcttgccgagagcaaaattaaagcggggaagttctacttcttcaccacgcagcaaggcttgcagctgttggttgaacagctcgaggtcgagcgcgtaaagcgattcataatcatagtttccgttttcatccaaaggagtatcctcacggtctacgaaataattatcgagagagataggaaaaggtttcaacccatttgtcatcaactggattgaaagccgcttgctgaaagtggtctttccggaagaagacggtccggcaatcagtaccagtttcacccggttgccgttttcgccacgatgaaaaatggtatcggcaatctgggctatcttcttttcctgcaatgcctcagcaacgttaatcaaatctgttgcatggccttcttcgcaagcgaggttgaaatcgcctgcattgttgagtcccatgatatagctccaattcagatattctttaaagacgtccaacatcttttcctgctttacaacgtcttccagcacttcgggattctcgcggctgggaatacgcagcaatagtccatcgtaatacttcacgatgtcaaacagtttaagatagccggtgctaggcaacaggttgccataatagtaatcgaccgtatcgcccaacgtataataataggtatagagggaaccggaagtttcgagcaaccggactttatcattcataccccgttcgctgaaaatgcgtacagcttcggctgtatggcattcgatacgatgatagggtatattttctgcaataatctcctgcatacgttgcttgatgcgttttacatcctccaattcaatgggacgcccgatacgcagattacagaaataacctttcgaaacgggatgttctacaaacagcttgccctcgggaaacaattccgtgaccgccttaaacagtacaaaacagagcgaacggacataggtacgcataccggactggtctctcacgtccagaaactctatatccttattattatataccctaaaattaagtccctcagagcggttattgactttagcactaaccacttgataaggaaaattaagattaaaaccgtaataaatatccaaaagtgagctcccgatggggaattctttagaaatattgttatttttgcaacatatttgtaacatctgtttcatcgagttcgttaaaaggtgaataatttgggactaatatacttataatcagactgagaacaaataaccattaacaatattatagatggaatattctttttatgattttttaaagctcataggttcattagggctcttcctgtacggaatgaagataatgagtgagggcttgcaaaaggtcgcgggtgacagactacgaagtatcttgacggcaatgactaccaacagggtaacgggagttttaacaggtgtgttaatcacagcccttatccaatcttcttcagcaacgacggtaatggtcgtgagtttcgtgaatgccgggttactcactctcgctgaatctatcagtgtcatcatgggtgccaatatcggtactacggtcactgcctggattatctcaattttcggatttaaggttgatatggccgcatttgcccttcctcttctggccattgcccttccgctcatcttctccggcaaaagcaaccgtaagtctgtcggtgaattcattttcggtttttctttcctcttcatgggactttcttacctgaaagcgaatgctcccgacctgaatgccaacccggaaatgcttgcctttgtacagaactacacggacatgggattcttctctatcctcctgttcttattcatcggtacgatactgactatgattgtgcaggcttcagccgcgacaatggcaatcacactgattatgtgtgccaacggctggatcagcctggagctgggagcagccctcgtactgggagaaaatatcggaactacgatcaccgccaatcttgccgcattaacagccaacacacaggctaaacgggcagcattggcgcattttgtttttaatgtgttcggtgttatctgggtattgattatcttccacccgttcatgcagttggttaactgggtagtagatactttcttccagacaagtaatccggaagttgctatctcttacaaactgtccgccttccactctattttcaatatctgcaacgtatgtatcctgatatggggtgtgaagttaattgaacgtaccgtatgcgctttaatccacccgaaggaagaagacgaagaaccaagactgcggttcattacaggcggtatgctttctacggcagaactttccatccttcaggcacgtaaggaaattcatttattcgctgaacgtacccaccgtatgttcggcatggtgcaagatttgctgcatacggaaaaggatgatgatttcaataagttgttcagccggatagagaaatacgagaatatcagcgacaacatggaactggagatagccaactacctgaatcaagtatcagagggtcgtttgagttctgaaagtaagttacagatacgcgccatgttgcgtgaagtgacggaaattgaaagtatcggggacagttgttacaacttggcacgtacgattaaccggaaacgccagacaaatcaagacttcaccgaaaagcaatatgagcatatccattttatgatgaagctgacgaacgacgctcttgcacaaatgattgtggtagtagagaaaccggaacatcagagtattgatatcaacaagtctttcaatatcgaaaacgaaatcaataattaccgcaaccaattgaagaatcagaacatcttggatgtaaacaacaaggaatatgattatcaaatgggagtttactatatggatattatcgccgaatgtgagaaactgggtgattatatagtaaatgtggtagaagccagcagtgatgtaaaagaaaagaaagcttcctaaataggagaaataaagaatagaaaaaggagaagcagttatgtactaatgcatctgcttctcctttttctttatcaattattttgtatttactcactatttattatagatataggattctgccagtcgccagaataaagtagattccgggacggtagttgtccgaagtaccttttgcgaactgccttccgagggattgatattagcaaaaatattccaccctttattaaaggaacactcgctataataataagatttatcactgccggtcaatatgaaggggcggtcggcatactgataactcaccaatgttgctttttccgcagacgttcccttgccggaccaattggaaagtgctattcgtcctaccctcgtatcgccattaaaaacaaaaaagtctcccaatgttgctaccagcgcatcaccgtcatttgaggttccagtccaataaccagccatatcaccattccgccgatctactttctgaagtctttccgaagggaaagtagcaggaagtgtcattacaatttgcccgttttcataagggaatataagagtttcaatcacttgccagtccaagccggtcacttttacctccacccggtcgaatgtaaaatttttcggcatattctgtatgtctttgactattatcgtactataatcaggaacatcaggagcaggtagttcttcttcattctcattatcactacaaccagctattaaaagcccgaacatcaacaaaaaagagataacaggatataagaggaagttagaactggtagttgccttgttatgcataattctatatttttgcatcaaagatactacatttataatcagcattacatttttattcaaaaaataaaaatagaaggtgtgtcgtaatacacgatgcgccttctttttttttcattgactataaaaatcggttcattttctttaagctgcgatattttgaggatttctttggtttatgtgttcgcaacatctaaatagagcaactgtaagctcataaaacggtctaatcagccaatccataccttctttagtcatttttgcacacatcttttttatattgaaggcaatggcaaagaaggaaaagtccatgaagaccttatcctttccaaaatggcggaaacgtttgtaattcatattgtttttcatttgtccgaacacggcttccggttctatgcatctctgtcctctgtgtttcagtccttcctctgagcagagcagctctttggctttttgcttgtattttctgagtctgtgattcaactctatcgttctgttcccctttgctttaaaacatcggcatcttagcggacagccttcacatctgatggctctgtacgtggcattttcgctgacatatccggatgctgttttcacatgtctagtccctatcctttgcatcttctgtcccatggggcagatacaaaagtcttgttcttcattgtagtagaagttttccgccctgaacgggtccggtttgaatctcggccgctgttccatgtggaagtagttgtatttgacgtagcccgccataccgttttctgacatgaagcggtaattctcctcagaaccgtagccggaatcggccaccaccgtatgggccaacctgtcatatctgcttgagaaggattgcaggaaaggtatcatggtcagtgtatccgtagggttcgggaagagtgcaaaatcggtaatgaactggttctcggtgccgatctggaggttgtaaccgggctttgtctggccgttacgcatggcatcctccttcattctcatgaaagtagcgtccttgtccgttttggaataggagttcctgtcctgtagcgtgttcagacggttgtcgtattcctgcagcttgtccctgtgttcttccagttccttcagctgtttgcgtttctttttcaacgcagtcttttcctctttcgtggagggctcaggaacctgttcaagtgctttccgcaattctccagccatttcagtcagcatggccggagtgaactcaatctcctcattgctttccgatgagttctcctgggcgatgacatcgtctatctgccctaacaggacatgtatcttcttcatcaggcgttcacagttccgctcaaccgtttttcgccagacgaaagtatacttattggctttggactcaatctttgtcccgtcaatgtattccacattcagcctgatgaagcctttggaagagagaaggagtacggtttgggtaaatacctcgttgatttcctttttcacccggttgcggaaacggttgatggtaatgaaatcaggtttctcatatccggcaagccagatataatggatgtcacgatgaaggagcttttcaattttacggcaggagtagacgttgttcatataggcatagagaatgaccttgagcatcatcctgggatggtaagggctgcggccgcattccttatacaacttcctgaaactttcaaggttcaggctctcaaccagagcgtcaaccatccgaactggatcatgctctgcaatatcctcgtcaattctttgaggaaaaagcactgtttggttggaattataaggacgaaaatgtatctttgtcatagtgaaaatcttatgcctaaagatacaaaatctttaggtaataacaaagccccagcttgtgaaagtcggggctttgtgcttaaaaaaaagaaggtgcgcattttgacacacctcccatttcctcttaataaattctctccctttgttttatccttcgtacggctcgaaatcttctttcccgactccgcatagaggacaagtccaatcatctggaatgtcttcaaaagcagttcctggttcaattccgctttccggatctccttgttcggggtcgtaaatatattcacagaccgtgcaaatgtacttcttcataacgttcgtatttttaattggttttctaattaatataacacaaataacaagatatttgttcaacacttttttatagtgaaagaaaaaaactatctttgtaaccgtattcaacaagctgaaccaacaatattatgtcatgttaatagcacttttatctaccctcataattttatgtgcaatcctgttaatcagttttttgtgggagcgcaggaaatgccttcgaatgcagaaacggttatttcgggaatccagaaaactagaacataccaaccatgttgccagtgctatcttgaaaaatgtacacgccttcatcctgttaataaacaacgacttcaaagtgctgaaaacgaattactaccaacagaccggaacacgaaaaggaccggaagaaaaaagagtaggtgatttgttgcagtgccgtaatgcattatcggcagagggaggttgcggtacacatgtttattgtggctcctgtcctatacgccaggctatccgtcaggctttcgaacaaagaagaggattcactaatctggaagccactttgaatatggttacttccgaaaatcaaacggtagcctgtgaagccgttatttccggctcttatttcctcctcaatgaagaagaaaatatggtgcttaccgtacatgatattacccatttgaaacaagtagaaagggaattaaaagtggcaaaagagaaagcggaaaatgcagatatagcaaaatcagccttcctggccaacatgagccatgagattcgtactccgctgaatgctatcaccgggtttgcagaagtaatgggcagcgcaaacacagaagaagaaaaaacacaataccaagaaattatcaaaatgaatgccgatcttctgatgcaattagtaaatgatattcttgatatgtcaaaaatagaagcgggcactttagaatttgtgtattcaacggtagatattaatttgttgctatccgatttacaaagacttttccaaatgaggattaatgatgccggaggaaaagtacagataatagcagagccttcactttcttcctgctttatacagaccgaccgcaatcgggtggcacaggtcatttccaatttcgtgggcaacgctattaaatttacccgggaaggaaatatccgtatcggttatgaagctaaagatactgaactatatttctacgtgaaagacacgggtacgggcataccggcagaaaaactgtcgaatgtattcgggcgttttgtgaaactgaataaagaccaaaaaggtgcaggactgggactttcgatttcacaaacgattgtaggcaaattgagcggccagatcggagcggattccattgaaggagaaggttctaccttctggtttaccctcccttatctttcatgcggcaaacctcagtaagaaattctacttcataaaaagttttaattaaacattttatcacaattatatgttgtatttttgcagtccaaactaaacgcatgtatctgcatgagtacaaataaagatgattacaatcatttaggccttacggacagtgaggtcctacaaagcagggaaaagaatggtataaacctgttaacaccccccaagcgtccttctttatggaaactttatcttgagaaatttgaggacccggtcgtacgcgtactgctagttgcagccgtcttttcgttgattatttccattatcgaaaatgagtacgccgaaacgatcggtatcatagccgctatcttgctggctacgggtatcggtttcttttttgaatatgatgccaacaaaaaattcgacttactgaatgccgttaatgaggaaacactagttaaagtgattcgtaacggccgcgtacaggaagttccgcgcaaagatatagttgtaggcgacatcgtgattttggaaaccggagaagaaatcccggctgacggagaattggtggaagctatctctttgcaagtaaacgaatccaacctgaccggagaacctgttatcaataagacgattatagaagcagattttgacgaagaagcgacttacgcctctaatttggtgatgcgtggcactacggtagtcgacggtcatggcacaatgcgcgttctgcacgtaggagatgcaacggaaataggaaaagtggcccgccaaagtacggaagaaaaccttgaaccgactccactaaatatacagttgaccaaattagccaatctaatcggaaaaattggttttactgttgccggcctggctttccttatcttcttcgtaaaagatgtattgctatattttgatttcggtgcattaaacggctggcacgaatggcttccggtatttgaacggacacttaaatactttatgatggctgttacgctgattgttgttgctgttcccgaaggattgccgatgagtgtgactcttagtctggccctaaatatgcgccgtatgctttctaccaacaacctggttcggaaaatgcacgcttgcgagacaatgggtgctatcactgtcatctgtacggataaaaccggtacgctgacgcaaaatctgatgcaagtgcacgaaccaaacttctatggaatcaaaaacggcagtaacctgtccgatgatgatatcagtgcattgattgcagagggaatcagcgctaattcaaccgccttccttgaggaaacagaagccggggaaaagccgaaaggagtaggaaatccgacggaagtggccttactattatggctcaatagtcagggaagaaattacctgaaactccgtgagaacgcccgtgttctcgaccagctcaccttctctacggagcgcaagttcatggctacgcttgtagaatcaccattaatcggaaagaaaatactctatataaaaggtgctcccgaaattgttctgggcaaatgtaaagaagttgtcttggacggaagacgggtggatgccgtggaataccgttcaacagtagaagcacaactactgaattaccagaatatggcgatgcgcacactgggcttcgccttcaaaatcgtagaggagaatgagccgaatgattgtgtagaacttgtttcgacaaacgacttgaacttcttgggagtggttgctatctctgacccgattcgtccggatgttcctgccgccgtagccaaatgtcagtcggcaggtatcggtatcaagattgtgaccggcgacactccggggactgcaaccgagattgctcgtcagataggtctttggaagccggaaaccgacaccgaccggaatcgtatcactggtgttgcttttgctgaattgagtgacgaagaagcacttgacagggtaatggatttgaaaattatgtcgcgtgcccgtcctacagacaaacaacgccttgtgcagttgctccagcaaaaaggagcggtagtagccgtaaccggagacggaacaaatgatgcgcctgctctgaaccatgcacaagtcggcttatcaatgggtacaggaacttctgtagccaaagaggccagtgatattacattgcttgatgattcgttcaacagtatcggaaccgccgtcatgtggggacgttcgctttataagaatatccagcgtttcatcgttttccagttaacgatcaacttcgttgcattacttatcgttctattgggttccgttatcggcacggaacttccgttgactgtgacgcagatgttgtgggtaaacttgattatggatactttcgcagcgctggccctggcttctattccgcccagcgaaactgttatgctcgaaaagcctcgtcgcagtactgatttcattatcagcaaagcaatgaggtctaacatattaggggtaggttctatcttcctcatcgtactgctcggaatgatttattatttcgaccacagtgcaaaaggtatggatgtacacaacctcactattttcttcaccttctttgtcatgttacaattctggaacctgtttaatgcacgtgtgttcggcactaccgactcggcattcaaaggactttccaaatcgtatggcatggaattaattgtgcttgccattcttgtcggacaattccttattgtacagttcggtggtgctgtattccgcacggaaccactcgactggcagacatggcttctaattataggcgtttcgtccatggtgttatgggttggagaacttgttcgccttgttcagcgtattattcacaaaagaaaaagaaatgaaaagtaaaggaattaaaaaccttcttattgatttaggcggtgtacttatcaatctcgaccgtcaacgttgtatcgagaacttccagaaattagggctccgtaacgtggaggaactattggacatctcaaatcaggacggaatcctgatgcagcaggagaaaggcttgattactcccgcagaatttcgtaatggcgttcgcgaaatgataggtaaagtagttagtgacaaacaaattgatgccgcctggaatagttttctggtagatataccaacacacaaacttgatttattgctgaagttacgcgaaaaatatgtagtctatttgttgagtaatacaaacgagattcattggaaatggacttgtaagaatctattcccctaccgtactttcaaagtagaggactattttgaaaaaacatatctctcttttgaaatgaaaatggccaaacccgaaccggaaatttttaaagcaatattggatgatgccggcatcgaaccggaggagactctttttattgatgattccgaaatcaactgcaaagcggcacagaacttaggaatctctacttatacggcaaaagccggcgaagactggagtcatcttttcaacagtaaataatttaatagatatgcagattatacgtgacatatcggctataaaaccagaaccctgtgtagctaccataggcttctttgacggagtgcatgcaggacatcgctatctgattcaacaagtgaaagagatagccgcagccaaaggtctacgttctgcattggtcactttccctgttcatccccgtaaggtaatgaatgcaacctatcggccggaactcctgactactccgaaagagaaaattagtctgcttgccgacattggtgtagactattgcctgatgctcgatttcaccccggacatttcgcagttaaccgcccgcgaatttatgaaccgactgttaaaagagcgttatcaggtgaaatgtctggttatcggttatgaccaccgtttcggacataatcgcagcgaaggattcgaggactatgtatgctacgggaaagaaattggtatagaggtaattcgtgcacaggcatataccagtgacatagaaataggaactacccgaaacattccggtaagttcgtctttaattcgtaaactgttacatgaaggagaagtggaaatcgcagcccgttgcctgaaatatgaatattttttggacgggactgttgtaggcggttaccaagtaggcagaaagatcggctttccgactgccaatttaagcgtagatgatccggataaacttattcctgccgatggcgtatatgccgtatgggtaacgtttgacgggaaaacatacatgggaatgctaaatataggtgtccgcccgacgattgacaatggtccgaatcgaacaattgaagtgaatatccttcacttccactcgaatatatatgataaattcatccggctcacttttgtaaaacggacacgccctgaactgaagttctccagcattgacgagctaatagtccaactccacaaagatgcagaagaaaccgaagcgattcttcttgccagcaaagcaagaagtaaccaacaggaagaaccaagaaaataatacatcaaccgaataacaacttaaaatagattcttatgcaaaagtcatttatgagtatttctctggtggtaatagcaatttctatgttagctatgtttatatgcagcttcttcgctactaaataaaaaagtaaaatatgaagacggctatcaaacttgtattaatagaccttgtcattgcgcaaattgttgcccctgtcctgattatgattccttgtactatctatttgttagtaaccacaggaaatttagataaggctgttctgacacaaacaattatgattccggcgcaattggccggtcagataatgatgggtatctatctgtggaaggccggctacatcagcacaaagaaagagacctggtcacttgtgtccgctccttatcttttaggtagtgcagtggcaatccttaccagtggatttgttgtttcttcattaatgagtttgctggattggatacctaatatcatggagcaatctttcgatatcctccaatccggctggggagggattcttgcaatagcaatcgtaggccctgtacttgaagaattattgttccggggagcaatcaccaaagctttgctccaacaatataatccgaccaaagcaattcttatttcggcacttctattcggtgcctttcatataaatcccgcacagatacttccggcatttctgatcggtatcctgttggcatggacttattataaaacgggtagtctgataccttgtatattcatgcatatattaaataactccttatcagtatatctcagtatcaaatatcccgaagcggagaatatggatgacctgattagcggtacaccgtatcttattattcttatcggtgcaattgtcatactggcaggagtcattccatatatgcaacgcatgacctctaataagtagaggtcatatcttcaggaacacaaatataaaagtctgctcttcctttattttcttcatctaattggtctatactttcctgacggactgaacagacagttttaatcgttgtccccggacgatattgaagcagataaggaattattcctcctttaaaatcagaatggtagttcccgttaaaatgcaggaatttatcctttatattatgagctataaaccagcccattgttgcatctttgatagcttgcgcctgtgccaaatattcctgattgcctttactcttacccatcatctgcattaatgcaaaagcaccaccttcttcttccttgtaggtaaactgaataggaagaggcggcaagtatcgctttgcttcattagataatgaatccaaatactgtaagccattatcttttacaacattagcatagcgtcgtggtacgttagttgcaataaatggaattttattctcttttgcgaaaaagacaaatggagcataatccgtactataattatcccacaaccgggcttctgcctcaaatctgtcataagaaatcgcgcgactcatgtattcatccaaaatcagctgattatccgcctcaagcatttcagctcccaacatcagtttttccttatgaatagcatatagcgaacgggttatttcatattccagccaatgagtaatacaacaattatgaatctcgcctataaacacgacatccggttgtgccaacgcttcaataagctcatcatagcctatctccttgccttcggcattaaacaatgtatatgctctcttgtatcctttctgagcaaaggccgctactcctatagaacacaaaagcaataacccacaaaatcttgagaaaaataaattattcatatttttgatgttttccaatatataacaatacaaatttatcgggattcgtaaaatgcttaaatgctttctgaatatccacagtggatatgctattgagacattgttcatatcgctcaaaatcagcgacagactcaccattcttcagcaaattcacaagattagtacgccattcggcagaagcctcatccgaaagcacttttcgttttgtaacccaaaaagactttttcaaagtttccaattcctcttcgctcactttacttgtacgaagctcatttataatctgctttataagctcctccaccttcttcgtatttacgaaatcaacagaggccgacaaatcaaaataaaagacttgttgtggcagcccattataaaataaagaagcgtatggagaatagactatattctctccttcacgcaaaacacttaacaagcggttttgcaagatatcacgcatcaatttcagtgtaaggctatttttcaaggaaggctgataatttccacagaaaacataatcaaagatagtctgcgtatcattatcattcggaaattcttctatgtaagttttcttagggagcttaaacgctttgttgggataagacactgtatttactttcggcatacgtccgaacgtcgcagttaacaattctttgatgctatccgtatcaaactttcctgttactacgaatgtcatttgcgacggattgctgtataatgaacaataataatctgcaatcttatccagatccaatctttccagatccatttttgttagagccggacgaggtaccgtatttcccattagagaatccaggcggtttgtcaacatacgatcagaagcacgtttcatcatttgttccaatacactttccttcccgaaacgctccatttcatctttacgaatctcatcaaaatcctcatagcaaagctccggacgacacatcttctcgtacatcaaattaaagagttctcgtgctttggcagcaggagacattcccataatatcatgccaataattactgatagcaatattcatagatatttcttcctgttgcataaaagaagatagagtatcataaggaatacaagctacccctcccatttccatataacctcctgtcccttcatataaaggataatctttatctgataaatctgctgtccctcctcttccaaaagctgtcacaaaaatggattgactttcatcatttgtcggacggagaagaatacgtaagtcatttttcagaattacttctgttatgttaaggtctgcgtatttcttctcactaactatatctgaggccttaaaaggataactctcaaccaggcaagcaggtgtcactactctttcttctttcacatctttacgtacatacgtaaaatctttcaacgggttcttaataccttcatcccatgcctgaacaacttcttcttttttaagagaattttgtttacctgcattattacgataagccaccaataaggtttgatctttgtatgaaagccactcacgcaaaagttgttgcaaagtagcgctatcagtcgcccgtatcttgtccgccaactgtttcatttcactatctgactgaatataacggtcgtcggatatcacataatcaacaaaatcatcacaccatttagaagataattgagttgagttatctactttcaaacgcctcagatgctcatcaatagcatcctccacttcttcctgcttaaagccgtttttctgaatagactccatttcattagacagttcggatacttgttgcaagagatttgccttatctaccccggaaaaagcaaaaacaaaatgattcttatcagaaagaaaccatgcatcagaaacattgcaccggatattctggtatttcaaccggttactgatagcacgtatcaataaagatccgagttccttctgataaatactgccgattgtattaccaatcacacaaggatgaggaatcatcagctccaactctgaactacgctccagatcatccccaatttcatataactcaactcccgggtcataagtcaatggataagtacgatagcctttgacttctttacgaggaatagatgaaaacatttccttgatttgtttttcaatagattccggatctacattaccaaccacaactacggtagccatctgcggagaataccattttttatagaattcaatcaacgtcttacggtcaatactacgaatatcctcggaacttcccaacggcatacgctccgtgaaatggttctttccgatttttaatgcataaaaatcatcccccaagtcatatccgcgcaattcttccaaaataacgccccgttccttcttcgtccgctcttcttcgaaagtgattccgctcagccaatctttcaaaatcaataaagttttgctactaactttatggtcagttttatccataggcactgtcaacataaagatcgtacgatcatatccggttaccgcatttatatcacgtccaaacttcatgcccaaagtttccagatagtctaccattcccctgccaggaaaatgtttactaccggcaaacgacatatgctccagaaaatgggcggctcctttttgctcttccgactcttgaacagaaccgatacgcatcactaaccggaattctgttgtgtgaatcggcgcctcgttaggaaggattaaataatgtaacccattagccaaggtcccttcaactgtattaggaggtaaatttacttttttctccaaatgagaagctttctgttgtgcaagcatattcacgggaagtcctcctaatagaactgccaagaatagaaaaactttaaactttgtctgcttaaacatgaatggtcgttttatatattatatttattcatttaatgtataagtcacgcgaatctgagtataccctaacgaattaacatgatcccaagggaattgaaaactaaaggttttctcattaaacattcctttcggttcaatccagtctgaaggttcattctcccaattgtcttcatcaatagacgaatacactaaacaaactggatttaaagttattccttcctctatcaaatcactaacactcgcttccaccatattatctccctcctgaactaaaatcgtaccaccttcgtcagccattttcttccaacgctcccaagcggtaaaagaatattcaaaaggcaatgattctatttcttcatcccaaagatttaaagtcgggcctacgaatgaaaaagtaccttcatccggcaataattccaaattatcaagaactacactaaatacttccttactcatgtcatagccaatcgcctccatcatagagacatatttacttccttcaaaaatccaaaattcattctccaccgtttcttttctgtatatttcccacaaaaatgaagttattcccattggattatcaatcatcttaagtatcggacgatctgcagtagcattctcactcaatgttatcatactctttccttcaaaggagcgagtctccgtatcactaaatactccaacctcatctgctgggaaagtcacctctacgcgacagcttacttcacccataaagcgattaagattaagcctgtacttctccatatagccatgaacaaactcaatctgttgttcggtcaagtccggcaaggttggatttggccttacagtcagtttcaattcattccatggttgcatacgttcgtctgtataatcctttacctttaaagttatcatcctttggttattcagcaaactctgacgattggaaagtaccttgaaacgcgccgtcttctctcccgcctttatttgtactgccccattttccaagcgcaaaatatcatctgcattatccaacaattcgaaattaattacagcatcattttctacggaagtagccagaagtacatcaacagtaattgcacgttcatcactttccgaaagtgcaggatcatcggaagtactcatttgtatataattgcgtcccttataagtataatcaatgttgttactacaagctataacaatccaggacagacaaatcaaaaatatgaataaagaataatatttgtatttcataatcttctttgtttttaagatagaaaaattatctattcagaggccacccctcattttgagtcatattctcattatatttatattcagaacgaggaataggaaaacaccagcgataatcgctactctcaatttttacatcttcactgctcccccatttcgctaaccgggaaaggcttccagaatgtaaacgtttcaaatcaaaatacagtataccttcacccgcaaattctttcattttttccagatgaatagcctgcagcagtgcattacctgtcagtccctcatcaagagtcgtggcttgacaagctgccaaatattcattcaatttccgaattgcgacatcttctttacccaccatccgactataagcctcggtagctatgaaataagctccggcataacgcattatatttatcctcaaatccgcaactacgcgcctaatatgatacagaagcgaaaagaatctgcatcgttagtaaaaagggggcacagtgcatcgaatgtcaccataaagacatataaatgccccttaccccaccatgcgacttgaggcaatacgcaaaatcacgactataagttgtcggtgttatccaaagtcattctggaacacattggcataagcattgttgcatgaatagatattcagcacatacttccttgatgtcctgacccatttggctggcacagagatgaacttaaagacaaacgtcttgatgcggcttgttgctttgagtccgaacctcttcacgtcaagcctcgccatgatgaatttatagaagttgcgtatgagtgccataagcagaagaaacaccgtgttttctcccataaaggattttggaagcctgttccagccgaatccgttattcatatcatcgaagatgcgttccttccctccacggaggttatagaattcgacaatctctttctcggaagactcgtagtcatttgtaaggatgcagcggtaggtgtattctccttcccacaggtcgagttcgccgtctatccgcttctgtctttgaatcacaagacggtatgccttccctttccatttctcgatgagaatggaggccagctcaaactcaatgccgcccaattccactttcttccaacctctgagggcaaagatgtcattgtagagcgaactgcatcggttagcacggatatagaaggtcttgcagtgtttagcaatctcttccactatctcttcagaacacgagccgcaatcagctctgaaacggttgataataagcttgttttgttcaaacctttcaaagaacctcttcagcgtgtccttctggtggaaacggacatttgtgttgccgtcgctgttctcaatgccgacaatcaagttgccaataaccgccacgccagggcgataaccaaggaacttcttgtatgtaggcttcgcatcaaacttctcagcctctatgaactggtggtcgaagtcaacgtcatacccctcgccctctttcagctgccctgtggacaataggcaattgaggagcagtgtattcagcttgtctgccgtgttgaagtcgtaggtcttgccagtgtcggatgtgtaggaaatgttatcctgggtcagttcctttatggctctaagaatcgtgtcggcactgcatgtgcgaagtgtcggatgaagcgaaaggtggtacatcagatgagtggtgacatcctcgatgcatgagccgccacaaaaataaacgctcataagcgaacggatgatttcgctgtattgataaccatacagcctgcatctcataccgagggttgagtcgattacagatgagagtctggagtcaaattgctccattattgaaaatattcctccaaaaggagtgagtttctcggatttaattgctacctttgccatgtctgtcgggtttgatacatattttgatttgcaacactaagataggtgaaaaatctgacatggcaaattcctgagcaactttttgttgctcaggtacttaaaaagttatatttgtaatagtgttgcggaattaaggtttatatattgtatactttctgaatccttatttactttattatatttacctagcaaattcctttgttctccttccatttcaaaaggataaacattgtatgtcttccgtatatcttcctccccataaacaatctgaggattcaaagcgaaataatcaccacttgtttcattaaactgaatgtccgcataataactctttgctgtataaaacgcaaagatacgctccttgcaagaagcagtttcccacaaacgtttatatcccgcaacagtaaacatatcatctgttgcctgctctaatattttctctgcataaatcgcagcctgtccatattgtcctgcatataattccagttcagcaagcaaataataaaccgctgtttgagataaccacccatttctttccggatcattctccgtatcggccgcctctgtcaacaatgtacggatagcagatacacaatcttcaatagaagaacgttttggaaattcaagtcccaaacgttctttcaaaacaatgccatcagcttgcggatctttgtcataagctggtgcaaacaaccttagcaaattgaaataacaaagagccttcaatgctttgcactcacttattatagctgcttttgcactctcctccgaagcattctccaatacgatattatccacccgttcaagcaaagtattgcaagaagcaattgtattataatattccagccagatagtctccgcaaaagaagttatagagttatcctgccacaaataaagattcttctgactcatatcctttcctgtaatagacgtttgacaaaagtcatcacctaagatagaaagttcatattcatagtgcggatatagtaaataagcagatgtcaggagcgaacgggccgtggaaacattagtaatagcatcaggatccgaatactggtcagcaggaggaatatcaagtgaacaagacgatactcccgctaaaattcctgatatggcagtaaatatatagatgaatttctttatcataatcattattctttaaaaagtcagactcatattgaatgtataaataggctgcatactacccgccaatgtaccactttccggatccgattccttatatgaggtccacgtaaacaaattagaaccctgaaaagcaagcgtcgcatactttacaaacggtaatgtctttcttaagaaatgaggtggcactcggtaacgaagagaaaccatagagagcttcaaataatcactcttacctactgtcaacgagttcgggtattggcttaaattgtcttctgctacagcagatgtgtaaaaaggagtcggataaactttaccttcatctcccggtttaaaccacattttatctgtttgtccagcaacagcatttttatttgaatcatctttatcacgcacatacgaatagttaaattggtggataccaccgtgtacataatagaaatccatatccaaatcgaatgatttataagaaagcgatagtccaaaacttccgctatatggaggcgtagaatgacccaatgctaccacatcttcagcagtcaatgcttcacttgcttgtttttccttattacctttcaccagaaaaacaggataaccagtcaaaggattaatccccagagaagaaggtccgtaaatcatatcatacgacttacccacctcataatcaggaagcaatgcttcttcagaggtatatattctatcagcataataaagatcaataactttgttacggttataagctatattcccccgcaaactaagcaaccaatcgtttgtatccaacactttcatattcactccaaattcgaaacctctattctcaagtattcctatattacgtttcaatgtagtatatccagtagaagacggaatcggaacatccaacaacgcttgttcggtacgacggttgtaccaactcgcctctaaagtgatacgatcaaacagacctatattaattcctgcatcaatagacttagtctgttccggtttcagatctttattataaagccccattaagtcaagtggacgctggtcttcataactgttagtagaataagcaaaagtggctactgttgaagagacagagacgccattcaaattggcagtatatccataagaagcttttaggttcagacgggttaaaacggggttatccgacagaaattcataataactaggagtccaaccaatccccactgcccaagcactgttccagcgtttgtcggaaggcaaaatagaggaagcgtcagtcttataagtaccataaaggtcataaatattatcaaaagtatacccgacaacagcaccaaatcccaactgggcatttttatctttcaacgcccccacttcagctttacgcgttccttgaatagattgattgatagcagccgcagattttatagttccaaccccataaccagtaatagaaacattatccaactgcgtcaggtaataatctatattagcacctaacgtcagattatgtttccctgcatatacattattataagtcacacgaacattagtagaaacattggttgtcgtattctttgattttgaataaataccacgttgaatctcaggaactcccgttgtcatttccgaatatgcagtagaaggagtaaattgttctgtctcgtccagcaaaaaatccaggccggccactgccgccacatccagtccaggtaatgggttcaaaatcaaactgccactaataccggctgtctttgccgcatcttcctgactgtactgattcatcaaatcattgtaggtacgtcccggataagaaactaattcgccactatcttttgtttcataaggattcagttcataaaccagttgagtagggtccgaggttgtaccattcggtgtatttgtcttagcatatcccccatttacacttagcaatgcataaccgatatgtcccaatttctggtccatattcatgcgcaaactcatacgccgtttatcattacccggcaaacgccctccctgttgagtatagttagcagaaacataataggttgtctcttcacttcctccacgaatactgacattatgtttctgataaagactattccggataagttcatggaaccagtcggtattaatattcttcaattcatccagtttttgttgtcctgccgctatcagttgtggcaaattcggatcatcagcatgatatttattataataatctgcactatatcggtaaccgggagtttctacattttgcaaacgacgttccagttccagcttttctacagaattcatcatagaaattccccgacggccacgagtagttatacccatatccaaagtataggtaaccattgtttgtccgctaattccacgctgggaagttatttccagtaccccattagcagcttttataccatataaagcacaagcagccgcatctttaagtaccttgatttctttaatatcttgagggttcagattataaaaagtttccgagcttatgacctttccatccattacatacagtggctcattggttgtgtttccccttcgtaaagaggaatttcccctgatgcgtatctcaggagcagaacccagttctcctgtatttgttacaatcagccccggtacagatccctgcaaagccaagcccatatcaatcatcggcttactattaatacgccgcatatcgacttcttgcactacaccggaacgagcacgaatatctatctcgttaatattggctttagcagtcacaacaacctcatccatattattagtgtcgtccgccaaagttacttccagcttagtctgacctttataagtgatagttttacgccgcataccaataaacgaaaattcaattgatacaccttgctcccatttacctgctagcacaaactctcctttttcattggagactgtcccataaggagtattttttactttaatgtttacaccagccaaaggcaagttctgagaatcatatacgtgtccggttattcggttttccctcacttgagcttgtactaacatatagaaaaccatacaaaaccagaacaggattactcttttcacataatttttcataagctcgcgttttattcacttttttgcaaaaaaataaataaaaaagcaaagtatcaaacgaaacttattatattatatatttttaaacattggtcaaatagacagatttcttacttttttctaaataaaacaacagaaaaactagcaaaaaacttccataaacctatgtacaagctttcctgaataaaatctataattttataaaattttcacaagatcaacaagcatatcataaaaaagggaagttctcacttcccctcttttgctttgaatgccaatgcatacattcgtatttgtttgaccatggacaacaacccattgctacgtgtaggtgacagatgttctttcaaccctatcttatctataaaataaagatcagtattcaagatttcatcaggagtgtgtcctgaaaggacttttatcagcaaggcaataattccttttacaatcaaagcatcactttccgccttaaaaacaatcttaccgtctacctcgtccgcttgaagccatactctgctttgacatccttcaatcagattctgttccgtcttatatttttcttcaagcggttcctgctcatttcccaaatcaataagtagttgataccgatccatccagtcatcgaagtcactgaactctgcaatcacttcgtcttgtaattcattaattgacatatatataattgctatttacaaatttctaaatactctaaataacaaggagattatttttcattgtagattacttccaatacagtctgcccgaccgccttcagtgtattcctgtctatatgctccatattatcattgatagtatgccaggtcggggtaaaaccaccttccggatcggaagcaataatatcgatcgttttaatacgtgccaggcggttgataaacaaatggtcatccgtcacccctcctccgtcttcatcaatgaacattttgccatatcccaatttcttggctgctttccacacctttttatttatatccggcgcaaatctctcagaatatgattctttcaggaaaaccgtattttcgccacctaccatatcaagcaggataccaaaacgagcattatatccctgtacatgagggttacgcgcccagtattgtgcacccagacaccatgattcttcattatcctggtcatgtgtaccataatcttcggcatcaagaaaaataatgtcaataccaagttccggctgccgttgattgaccaaacgggctatttccaacagagctcctactccgcttgcaccatcattcgctcccagaatcggagtcttgtgattcttttcgtcaggatcgttatcggcccacggacgtgtatcccagtgggcaaataaagcgattctttttttactttccggcttataagaaccgataatatttcgcgctttcaacaaagtaccgttataagcaatcagatcggcatactgatcggtcacctgcgcaccgaaatcttttaattgcttagccagataatttccacaagctacatgcccctttgtattaggaacacgaggaccaaaatctacttgattctttacatacagataagcactatctgcatcaaactgtggtacattcacaactatcttttcgttttgttcacttgtactatttgccttattgccacctccgcaggagaatgctgataataacaaaaaggcacttaccaatactatcataattttctttttcatcatcctcttttctattaaagtctcaaaattagtcattttcatcacagcattgttcagatgaaatagattattaacaaataaactttaattctacatttttctttccaaccgtaaactctacttttgctccgtttataagcggcaaattatgagtaacatgccctacaggaaaattaaagcaaacggggtaatcatactcttttaccaaatccgccagagcagcatacaactctttgcccagcgaacaatcttcttcatattccgtaaactgtccgacaatcagtccagataatttttcaagtacaccgcccaattttagattatacatcatgcgttcaatggcatgaggtcgttcgctgacatcttcgataaacagcacagttccttctgccggaatatcataaggagtaccgcgcaaaccgtaagctaccgccatattccccccacgaagaaccccctgcgtactgccctgcttattcaacttatgtttctcacaagtataagaaggcaagtttccgaacaggatatctttcaaatagtttgtacacggatcatcctccggctctaccgcaagatgacgtgccattaacgaatgcaacgaagcatatccgtttttctgaaacagattgtgcaatgcagtaatatcactgaagcccaacaaccatttcggatattcacgaaatgccgtaaaatcaatcttatctatcagatgtacagctccatatcctccacgactactaaggatagctttcactttcggatcatccattgcatcctgcaaatctttcagacgttggctgatcgtgccggcatatcgcccggatgaacctccggcgtgctttcccataacaactttcaccccccatgattcaatccgtttcttggcacctttcaggaattgtttgtctatcttactggagggcgatacgataactactttatcacctttctgcaaaaaaggaggaaattgaatatccatatatgttcttatttttttgacttccgttgataaaaatgtacccagtccacttccatttctaccggaagatcttcaggaccgaccgctccgacccacgagcctcccaattgcatatcaatcagcaggtaaaaaggctggttaaaagggtattgcccttcttcttttgtttgtatacgaggataggtaaacgtatgcatatcattgatataaaatgaaaggctgtccggatacatttctactgcgtaaacattgtaccggtcaggataaataggtcccgtggaatgagacttgggattttctgtgatgcccaatgtgtaggtataatgagaatgaacagtctgataagcaattgaatcgttattcaaacgttccataatatcaatttcgccaccggacggccatgccgctttttcgggtaacatccagatagccggccatgcccctttcgcagcattcaacttggcacaaatttcaatacgcccgtttataaaagccttcttgccttttgtataaacaccgcccgtcaaataaggagccgtgtcattgggctgaacctgattgacgatacctctcaacaccagtttgccttcacgcattgcataacaagaatcaaagtcagtcatgtaattattccaatccgactttcctcgtggaatcttactccacacctttgaatcaaaattctttttttgattaaagttttctttccagaccaaggaccaaccttcaggaaccttcgtcgtcttgcacgaaatgaacagccaacaaaggaggattaagctaacaaaaaatagatttttaaactgtttcatgtcttttttatttcattgggggattcatttgcaaaaatacaggaaaaaacgattccatgcatatctatcgaccaaaacaaataaaatatagcaaaatgttacataatggatgtaatttttcggattgcaatcgctattttctcaatcctttttctgatatttgctaaaaatctaacgttatggaacctattcaaagttttgcccaattgacggctcatctcaaaaaactaaatcatagaaaacggattgccgtagtctgtgccaatgatcctaacacggaatatgctattacccgcgcattggaagaaggaattgcggagtttctgatgatcggagattcggctattctggaaaaatatcctacactcaaacaatatcccgaatacataaaaatcatccatatagaagattcggacgaggcagcacgcgaagcggtacgcattgtccgtgagggaggagcagatattctgatgaaaggaattattaatacggacaacctgttgcacgctatacttgacaaagaaaaaggattgcttccgaaagggaaaattcttacgcatctggcggtaatggaaattccaacgtatcacaaattacttttcttctcggatgctgccgttattccgcgtcccactttgcaacaacgtatagaaatgatctggtatgctatatgcacgtgccgccacttcggtattgaacaaccacgtatcgccttaatccactgtacggaaaaagtaagcgccaagtttccccactcactggattatgtaaatatcgtggaacttgccgaagccggagagttcggaaatgtaattattgacggcccgctggatgtacgtaccgcctgcgagcaggcaagcggcgatattaaaggtattgtatctcctatcaacggacaagcggatgtgctgatattccccaatatagaatcgggtaatgcattctacaaatctgtgtccctgtttgcacaggcagaaatggcgggtttattgcaaggaccgatctgcccagtggtacttccgtctcgtagtgactccggcttgtccaaatattatagcatggcaatggcttgcctgcaagtctcaggagactgtgaatgcagaaaacaaataaatcaagtccccaataattcataattcaaaaatcaatattgatgaaaattctagttatcaatcccggctccacttcgacgaagattgcagtatatgaaaatgaaactccgctactggtccgtaatatcagccatacagtagaagaattatccgtttattcacaagtggtagaccagtttgaatttcggaagaatctggtactccaggagttggaagccaataagataccttttgactttgatgcagtcatcggacgcggaggactggtaaaaccgataccgggtggagtatatgaggtaaatgaagccatgaaacgtgatacggtacacgccatgcgcactcatgcctgtaaccttggaggattaattgcagacaaacttgcttcttccttacccaattgtcgtgctttcattgccgatccgggagtagtggatgaactggaagatatagcccgtatcacaggctcaccgttaatgcccaaaattacaatttggcatgccttgaaccagaaagcaatagcacgccgcttcgccagagagcagggaacacaatacgaagaccttgatttaatcatctgccatttgggaggtggtatttctattgcagttcaccgccatggacgggctattgatgcaaacaatgcgttggacggcgaaggccctttctcgccggaacgtgcaggtacactgcctgccggtcaactcatcgacctttgttttagcggacagttcaccaaagatgaattgaagaagcgtatttccggacgtgcgggactgacagctcacttgggtactaccgatgtacctgtgattatcaaatccatagaagaaggagacaaaaaagcggagttcgtattggacgccatgatttataacgtagcaaaagcaataggtggcgccgctactgtactttgtgggaagatagatgctattctcctgacaggagggattgcttactccgattatgtcatttcacgactcaaaaaacgtatttcttttttagctccgatccatatttatcccggagaaaacgaaatggaatcattggctttcaatgcgctaggggcattgaaaggagaacttccgatacaaatttataaataacacaaacttcccattcttgagtttcaccgtttttatcgtattgataaaacgctgataatcaacacaaatcaatatgcttctatcaccctcaaagcaaatatatggaaaaaaacacctcaactattttttgccttaacgccctctttcttttaaaggagggagtatttttaataaaagggagcgaagccccctcgacttcaccccctcacaatctttctcctctcatttcctaatacacggagaaacacgtttgaatcaaaaaaagttacacctataattataaactattcatccacctttaaagctccggcaggtctttatttccggtcttattcaccggcgaaccgtcagcgtttacttgaatagaaccatcgccattgcaaacaaaagcatttccataaatatctcctagcttgccaccttctttaatacacatccaataggctattgagaattcctcctgcccgtaagagaactgggtatgggatgcagagaatattgccttccattacataatgaatacctgtgccttcaaaagctcggtccaaaatttcggataccgactgattgttggcagctacattaactacccgttttacatctactgtttttttgttgtagacaaacaaatagttggtctgtgactctattttagagagtaactcacttactttcagcgttgagtggggaatgctgatttttacactctgagagtatccattctcacaataagcttgaaatgttacgaacagaagaaggaataaagtgatcttcatagttagtattatttgcttagattctaaactttttgggcaaaaaagccctttcaaagaaatttttctcatatctttgcaacgtgttaagttaacctcaaatccgcaactacgcgcctaatatgatacagaagcgaaaagaatctgcatcgttagtaaaaagggggcacagtgcatcgaatgtcaccataaagacatataaatgccccttaccccaccatgcgacttgaggcaatacgcaaaatcacgactataagttgtcggtgttatccaaagtcattctggaacacattggcataagcattgttgcatgaatagatattcagcacatacttccttgatgtcctgacccatttggctggcacagagatgaacttaaagacaaacgtcttgatgcggcttgttgctttgagtccgaacctcttcacgtcaagcctcgccatgatgaatttatagaagttgcgtatgagtgccataagcagaagaaacaccgtgttttctcccataaaggattttggaagcctgttccagccgaatccgttattcatatcatcgaagatgcgttccttccctccacggaggttatagaattcgacaatctctttctcggaagactcgtagtcatttgtaaggatgcagcggtaggtgtattctccttcccacaggtcgagttcgccgtctatccgcttctgtctttgaatcacaagacggtatgccttccctttccatttctcgatgagaatggaggccagctcaaactcaatgccgcccaattccactttcttccaacctctgagggcaaagatgtcattgtagagcgaactgcatcggttagcacggatatagaaggtcttgcagtgtttagcaatctcttccactatctcttcagaacacgagccgcaatcagctctgaaacggttgataataagcttgttttgttcaaacctttcaaagaacctcttcagcgtgtccttctggtggaaacggacatttgtgttgccgtcgctgttctcaatgccgacaatcaagttgccaataaccgccacgccagggcgataaccaaggaacttcttgtatgtaggcttcgcatcaaacttctcagcctctatgaactggtggtcgaagtcaacgtcatacccctcgccctctttcagctgccctgtggacaataggcaattgaggagcagtgtattcagcttgtctgccgtgttgaagtcgtaggtcttgccagtgtcggatgtgtaggaaatgttatcctgggtcagttcctttatggctctaagaatcgtgtcggcactgcatgtgcgaagtgtcggatgaagcgaaaggtggtacatcagatgagtggtgacatcctcgatgcatgagccgccacaaaaataaacgctcataagcgaacggatgatttcgctgtattgataaccatacagcctgcatctcataccgagggttgagtcgattacagatgagagtctggagtcaaattgctccattattgaaaatattcctccaaaaggagtgagtttctcggatttaattgctacctttgccatgtctgtcgggtttgatacatattttgatttgcaacactaagataggtgaaaaatctgacatggcaaattcctgagcaactttttgttgctcaggtacttaaaaagttatatttgtaatagtgttgcggaattaagggttaataaattgattaaggtcgatttttgactgtttcgaatcggaaagtatgggggtactttccgattctcttttaatgagatgctattgactgttattcataattgttatgcttttaagggttagtactaatttaaggtatatatttagcgtgagctcatttctttattttataaagatactgtctttttcggcacttatggagtaaataaacgaatgatctttctgaattactttcagtacgtgttccaccccatcctgatctttaaacttacccgtgcaacgataattcagtactttcggattctccacaacgatcttcactttataatatttctccagtttaccaagcaacaggttaaaaggagtatcatcaaaacagtataaaccatctttccaacggagataatcaaaatcagtaaaacgctcctttctgaactttccgtcccagaaaataaaaacctcgttcacccccagacgtgtaagcgaatgttcgctgcctttcgcatagatatcgacaataccttcaagcaaagtagttgtaaattcattgctaccccggtaagcacacacattaaaatgtgtttccactactctcacctgattagtttccgtatttacatagaatgggatttctttatttttcgccacctcgaagtaagctcctccgtctagttccacattcctctcattccgtccgaaatcatgggagtatgttaatgtaggctgtgcattcagccatactttcgtaccgtctgccaaagtaatctgtgctcgctggccagcaggcactgtcactgtctgcagatgcgctgtattaccataatgatactccttgaataaaaaagcacaactgattgctactactataacggcagctatacgggcactcttaccttaacataggtaagatatgagtacccacagccactttctctcccttattgtttattttggtattggtgaaaagggcaatatcgaacaacatatgttctttctgcaatgtccgacggttttcctccgattcattcacccagttaagaatacatttttcttcctcaacagtagtgttacccttaaaatatttatgtaataactcaacggaaacttttgcagaaaagcaaaagtttagacaaaaaaataacccgacttctagtaatcgggttattctatattatattaaaactgtcacttttttacttcttttccggtcttggcaacaaaacctttctagaaagtttgaatttaccggttttaggatcaatatcaatcaattttacatcaatttcgtcaccctctttaattccggcttcttccactgtttccaaacgtttccagtctatttcagaaatgtgcagcaaaccgtccttacccggcaaaaattcgatgaacgcaccgtaaggcatgatagaacgaaccttacctttgtacacttcacccacttcgggaacagcaacaattgccttgatcatgcgcattgcatcgtcaatacatttcttattagtacctgaaacttcgatacgtcccacaccttctgtttcttcgatagtgatgacagcaccggtctcttcctgcataccttgaattattttaccaccaggaccaatcacagcaccgataaattctttaggaattgtcatggtttcaatgcggggagcatgttctttcaagtctgcacgcggttcagcgattgtttcagcaatcttatccaagatgtgcatacgcccttccttagcctggttcaatgcacgttccaagatttcataagacagaccgtctaccttaatatccatttgcgtagcagtaataccatctcttgttccagtcaccttgaagtccatatctccgaggtggtcttcatcaccgaggatatcagacaatactgcatatttatcttcacctgcattcttaatcagtcccattgcaatacctgataccggcttcttgatcttcacacctgcatccattaatgccaatgttccggcacatacggtagccatagaagaagaaccattagattcgagaatttctgaaacaacacgtactacgtacggatagtcagcaggaatctgtcctttcaaagcgcgccaagccaagtggccatgaccaatttcacgacgacctacgccgcgttgtgcttttgcctcaccagtggaaaaaggagggaaattataatgtaacaggaaacgttcttttccgtgttccaatacattgtcaataatcttttcatcgagttttgtacccagtgtgacagaagtcagtgattgagtttcaccacgagtaaagatagcagatccgtgaggaccgggtaggtaacctacttcacaccaaatcgggcgaatttcggtagttttacgaccatccaggcgtttgccttcatcaagaatagaacggcgcattgcttctttttctacatcgtgataatagcggtcgatcaaagccgctttttcttccagttcctcttctgagaactgagccttaaactcttcacaaatagcttcgaaagcagcaaaacgttcatgtttattgttatttccggaagcagcaacagcataagccttgtcataacaagcttcacgaactgccttacgcaagtcttcgtcgtttacctcatggtcatattcacgttttacggttttgccaacttcttcagtcaactccatctgagctttgcaatgtaccttaattgcttcgtgagccactttcatagcctctagcaattctgcttcggatacttcgtgcatttcgccttctaccatcatgatattttcataagtagcagccaccataaggtccatatcagctttttccagttgctcaaaagtcggattgattacaaactgaccgtcaatacgcgctacacgcacttcggaaatcggtccgttaaatggaatatctgaaacagcaagtgctgcagaagctgcaagtcctgccaatgcgtccggcatatctacaccatctgctgagaagaggatgatatttacatatacctctgcatgataattgtcggggaataaggggcggagagcacggtcaacaagacggcaggtcaggatctcataatcagaagcccgaccttctcttttggtaaaaccaccggggaaacggccgaatgccgcaaatttttctttgtactctacctgtaaaggcataaaatctgttccgggaactgcatctttagcggcacaaacagtagccaacaacatggtgtttcccatgcgtagcattacagaaccgtctgcctgttttgccaactttcccgtctcgagtgtgatggttcttccatcaggtaactcgatcgtcttaacaattgggttaatcataaaaattgttttatctatactttttctttcaaaattcctgcaaagatatacatttatcgtggtaattaggtggaaatgagctaaaaagttagttagtaactgattttttttctaaattaggatgaagaacactgcaaaatgctttgactaatctcgaaaagacgtatatttgcaccttgtaaaaaacacacgagatatgaaaaagattacttttgttgcgcttgccgcacttactattacagcttgtagttccggtcctaaattccaagtgaacggagatatttcaggagccgacggaaaaatgctttatctcgaagcgtccggccttgaagggatcgccgcattggactcggtcaaactgaaaggagaaggagcattcagtttcaaacagccccgccccgaatcacccgaattttaccgtttgcgaatagacgacaaagtcattaacttttctgtcgattctatcgaaacgctccagataaaagcaccgtatgtagacttttcaactgcgtacaccatagaaggttccggaaacagcaacaaaataaaagagctaacgctgaaacaaatcgctcttcaaaagaatgtggacgacttgctagctacattacgcaacaataatatcagccacgatattttcgaagacagcctggccacgttgctcaataactataaagaggatgtgaaagtaaactatatattcgcagcaccgaatacggcagccgcttatttcgccctgttccaaaagctcaacaactatctgatattcgatccgttgaacaacaaagacgatgtgaaatgttttgcagccgtagctaccagcctcaacaatacatatcccgatgcagtacgctccaagaacctttataatatcgttattaaaggtatgaaaaacacacgtcaaccccaggcaaaagcactggagattccacaggaaaaaattgtagaaaccggcatcatcgacattgctttgcgcgacatacacgggaatgtgcgcaagttgactgacctgaaaggcaaagtcgtattactcgacttctccgtattccagtcaccggcaggcgctccccacaatatgttgcttcgcgaactatataataagtatgcttcacagggattggaaatttaccagatctctctcgatgcggacgaacactactggaaaacggcagcagccaacctcccttggatatgtgtgcgtgacggcaacggagtttattccaccaatgtagctgtatataatgttcgccaggttccatctatctttttgattaaccgcaacaacgaattgaaacttcgtggcgaggatatcaaggatttggaagcatccgtcaagtcattactctaagttgttataaattagcatatttcatttaaatatgttacatagcagcattttttgcttgacacgtatcacttaaaaagctatctttgcaaagaaataatgaaaagagggttccaacatggcacatgttggaattcttttttgtttatatgaccatttaaaacaattaaaggaggaaaacatcatggcttatatgtcagaagaaggttacaagaaacttatggcggaactgaaagaactggaaacagtggaacgcccgaagatctccgcggcaatagccgaagcaagagataaaggagacttgtcagaaaatgcagagtacgatgcagccaaagaggcacaaggtctgttggaaatgcgtatcaacaaactgaaaacagtgattgcggatgcaaaaatcattgatgagtccaagctcaaaactgattccgtacagattttaaataaggtggaactgaaaaatgtaaagaatggtatgaagatgacttataccatcgtttccgaaagtgaagctaacctgaaggaaggaaaaatttcagtaaacaccccgattgcacaaggtctgcttggcaagaagatcggtgatgtagcagaaattacagtaccgcaaggcaaaattgcattagaagtagtaaacatatccatttaacgttaaggcaggtctccgtatgaggcttgccttattttatcaataaaagttatggcaacaatattcagcagaatcatcgcaggcgaaatcccctgctacaaggtggcggaaaacgacaagttcttcgcatttctcgatatcaacccgttggtaaagggacatacattggtagtgcccaaacaagaagtagactatattttcgatttgagcgatgaagacctggctgcaatgcacgtatttgcaaagcaggtagcccgtgccatcgaaaaggccttcccgtgcaagaaggtgggtgaagcagtgattggactggaagttcctcacgcacatattcatttaatccctatccagaaggaatcggatatgctgttctctaatccgaaactgaaattgtcggacgaagaattcaagtctatcgcacaagcaatcaactcctctctataaaacatgatgacaaaataacgaaaggcgtcttgcgaaggacgcctttttcttttcctgcttctttcagaaaaaactctcattttttcaacgggtccggagacttgtcacggctttcggccacttcaaccagataaacaccggcacaaataaacactatggcaaaggtctgcgtccaactgaaacggtcctgtccgatagctagtgaagtgatagtagcaacaatcagaatcagatagccataaatggcaacaacggttgttttgagatatttcaatccgatcggaatcagcaaataactgactgtggtaggaaatatcaatacaaacatcagtatcaagaaaggttgccaatggataggtattgtcagtacaggagcatcaaaaccggtgatagccgtaacaatcaaaccggtaatggcggctcccgtaaatgtataacgcaacatcgtcatcgctcccacgtttgcaaggatacgttggctcattaccagatagacagcataagctacggaactaagcaaacaaagcatattccctgtaaatgcatccgaagcaaggtcgtcacttttctgagtcaagatgcacaccagagctccgaccagcccgatagccatacctactattttttttactgacaccttttctttatagaacacaatcataatcacaaacacccaaataggttccaaactagtaaaaatagaactggaaacaggcgtagtcttactcaacccgataagataaaggaacataaagccgtacaacccaaacgcccccaacagaagcaacaggattttttctttcggagtggactgttccttcggcatgaaccaaccgataatccaaaaagcggccgcagcaaacgtacaacggattgccgctcccgttagcggactcatccacaacggaagaagaaatttcaacgcattcatattaaaaccaccgaatatctttgaaacggccatgctgacgttagcttccagttttttatttctcatctttatttcaattggtcgttaaacaaaaaagtatcacggcaacggtatgcccagaagaaagtgccaacagtaatcaacagattgaagataaacggaaattcctgcgactgtgtatgaaatacccattgcagaaaatcaccaatgaaaggataaagcaaaattgccagataattcatcatcatcacaaatgccagtgccattgttgccttctgtggaagcgccgcatgagtcgttttctcgtacaacataggctgaataacgccatatcccaatccgacaagcagacaacccggaataatgagccactccaacggagctatccagattaataacaaccctaaagctatggataacagactatatgccttggtacgttcttttagaaggccgacaatcttattcaagcagaagcccggagccgtaatagccaggaagaaaagcgaaatcatcaaccccgaattaccgctggaaaaatgatgtttttccattaagaaaggcagattgaaaatcaccactactacaatataagtaattatcccgtaaaaagccattaactgtatcagatgcctgatatggataccatatttaccacctcctatatctatggatgaatcttcggcttccgaatcatctttctgagaagaagatacggcagcttccggctgagtcgtctttagatgtccaaccagcagaatagaaatcaagggaagcagatagaccagaaaaggcaaatgccaactgacttctgccagatatccggttacagcagtcgctataaccaaagtaaaattagtaatcgccgaacttaacccgaattgcttcacccgatatgtacccacaaaatacctggaaaccaatccggtggacaaaggaataatcaaccctgcccctacaccaagcaaggcacttaccactattaattgccacattttattggaaagcaaatataacactccacttgttgcaaacagccatagcccgacttgcaacacacggacaaaatcaactttttccgtcaatttaccaccgagcaatataaaagggataatcagcaacgatggcaacgaagtcaacatctgaatatccagatccgtagcttttggaaatatttttgtaagatcacccaaaataggtgaaacagccaaccctggcagagacgtcaatgccgaaatagaccatatagctattaaagttatgagagggatcgtccctttacctgtctttattttcatatacttgctcgttaaaagtttagattggaagaacaacaatacttccggtataaagttcaaaataacaagaaatgatttttgaagaaaaaagacatttgcatgatagactcgaatgaaaatgaagagaaaaatatccagaatctgaacgaaattcccccaaaagaccacctgaaaactatcaaaaaccacctaaaaactatccaccgatagcttttgggtcaaaatccgtcggattctaccccgtcgtatctgaaaaaatgccgtaaacttgcatcatcgaaattattacaacgaatactcacaatttaaaaagcaacgcatatgaaaagtttaagcttcagaaaagatttagtaggagtacaagatgaattactccggttcgcttataaactgacaaccgaccgcgaagaagcaaacgatttgttgcaggaaacatcattgaaagcattagataacgaagacaaatatacgcctgatactaatttcaaaggatggatgtataccatcatgcgcaacatctttatcaacaactaccgcaaagtagttcgcgaccaaacattcatcgaccggaccgataacctttatcacctgaacctgccacaagacgccggttttgagagtacagaaaaggcttatgacctgaaagagatgcaccgtgtggtcaacacacttcctaaagaatataaagtcccgttcgcgatgcacgtttccggcttcaaatatcgtgaaatagcagaaaagctgaatcttccgttaggaacggtaaagagccgtatcttcttcacacgccaaaaattgcaggaagaattaaaagacttccgctaaacggcaaagagtccggcgtctatgttgaaacgccatttttcagttaagtcaataggtataaaaaagcaaaaggagctgttcttcttttgctttttttattttcccgcctccctattcttattgatctcactatccattattcctctctccctacttattttttttcgtttaactatatcttacacactaatgaaactccctacatacgggaaaaacttccccccttaataaacgccaaataatgtaaaagccgaaaactttcaaaactatctgctgttgttgtgggaaattcgacggggaaaatccccatcgccctaaaccttttaaaaaacaaattagtatggaagatttaaatttcagaaaaggtgatgcaaaaaccgatgtatttggctcagacagaatgctacaaccctctccggtagagaaaattcctgatggccctactactcctgaagtcgcttatcaaatggtgaaagacgaaacattcgcccaaactcaaccacgtttgaacctggctactttcgttaccacttatatggacgaatatgcaaccaagctgatgaacgaagctatcaatatcaattatattgatgaaacagagtatccacgtatcgcagtaatgaatggtaaatgtatcaatatcgttgccaacttatggaactctcccgaaaaagacacatggaaaacaggtgcattggcaatcggttcttcagaagcttgtatgctgggtggtgtagctgcatggttgcgctggcgtaagaaaagacaggctcaaggcaaaccattcgataaaccaaatttcgttatttcaacaggtttccaggtggtatgggagaagtttgcacagttgtggcagattgaaatgcgtgaagtgcctttgacacttgataaaaccacactcgaccccgaagaagcattgaagatgtgtgacgaaaatacaatctgtgtcgtacctatccaaggtgttacatggacaggattgaacgatgatgttgaagcattagataaagcacttgatgcttacaacgcaaaaactggttatgacattcctatccacgtagacgccgcaagcggtggtttcatccttccgttcctttatccggaaaagaagtgggacttccgtttgaaatgggtgctttctatcagtgtatccggtcacaaattcggtttagtatatccaggacttggttgggtttgctggaaaggcaaagaatatctgcccgaagaaatggcgttcagcgtaaattatctgggtgctaacatcacacaggtaggtctgaacttctcccgtcctgccgctcagattctgggacaatattatcaattcattcgtttaggattccagggatacaaagaagtacaatacaattcgttgatgatcgctaaatatatccacgatgaaatcgccaaaatggctccgttcgtcaattactccgaagatgtagtgaacccattgttcatctggtatctcaaacctgaatacgccaaagcagccaaatggacgttatatgacctacaagacaaattgtctcaacatggttggatggttccggcttatacattaccttctaaactggaagactatgtagtaatgcgtgtcgttgtccgccaaggattcagccgcgatatggcagacatgttactaggtgacatcaacaatgctgttgccgaactagaaaaactggattatccgactcctacccgtatggctcaggaaaagaatcttccggtagaaacaaagatgttcaaccatggtggccgccgttacaaaacagttaaataagaatagatctatggataaaaaagtaacactcgctcaattgaaagaagtggtacaggaggcatacgaccaggtaaaaaccaatacaggaggcaagaatgccgactatattccttacttggcaaatgtcaataaagatctcttcggaattagtgtctgcctgctcaacgggcagactatccatgtgggagatactgattaccgcttcggaatagaatccgtatcgaaagtacataccgctatccttgcattacgtcaatatggcgccaaggaaattctggacaagatcggagctgatgcaaccggcttgcctttcaactcaatcatcgctatcttactggagaacgaccatccgtctactccattagtaaacgccggtgctatttctgcttgcagtatggtgaagcctatcggtgactctgccaagaaatgggatgctatcgttggaaacgtaaccgatttgtgcggcagcgctcctcagctgattgatgaattatataaatccgaatcggatacgaacttcaataaccgttctattgcctggttgttgaaaaactacaaccgtatctacgatgatccagatatgtcgttagacctctatacccgccaatgttcattaggagttactgcattacagctttctgttgctgccgggacaattgccaatggtggtgtgaacccagtgactaaaaaggaagttttcgatgctagccttgctcctaaaatcacagccatgattgctgcagtaggtttctacgaacataccggtgactggatgtacacttccggaatccctgcaaaaacaggtgtaggtggtggggtaatgggcgtattacccggacaattcggtatcgctgcattcgctcctcctttggacggatcgggtaactctgtaaaagctcagttggctatcgaatacatcatgaacaaactaagattgaatgtatttggtaacaatcgtatcactatagttgattaacgactctctctatgaaaaagatgaaaggttactgtctgcagatagtaaccttttttcttcttcccggttatacttcaatatgaaggatattatcttttataaaagcattatgtttttgcctcttgtacggattacgccggagtttcttgtccgacagccttctccttttcttcctcctcttctgcataatattgcttcttccgcttgttggactgctgaataagattcgtgatatacactgtaaagataggaaacatcatcattcctaacgctgccaacagtacggacaacactctaccggtcaccgttaccgctattatattcgacccgacagtagttacatccataaatgcccaccacaatgcatccccataactatggacaagcggatttactttatgctcaagcacaaagaaagcaagactggagaaataaacagtagccagcaacatcgtcagataagaaacgaacaggctcgaagccttattgtacgtcagccagccgaccacaatcgccagcgcatatccccccctcaacaaaggaataaaacggagtagataagtaatttcgggagaaaaagtccatccataataagcaataatgttctgataaggaatggctaccaacaggaaaatgaaatgtgtccgtaaataacgtcctttgtgtttcgccagaaaaaattccaatacaaaatcgaaaagaaaccaaatgcaaatccacaactgggttttcatataagacgactgtgtataaaaaggaattcccttaaaagtatctaccgagatactaattacgagaaaaagagacatcaccaatataataatgtggagaatgccataaatgccttttttccctaagataaaatctgaaagtgctgatttcataactacttagtttataataaaatgattcgtatgtaatttataatgcttagaaacaatcggagaaagcgattgttttgaaacagacaaattgagattggcaaaagagcagtttatcgatgttaattaacgaactttgaaagagattgctgaaacatctcacgctaaatgttgttataagactgactttaaaatatttttcacttaaaaccttaacttatggcaaatattaaaaatgcagtgaagctaggcgtgtttaccctagctatcatgaacgttacggcggtagtatccttacgtggactgccagccgaggccgtatacggaatgagttcggccttctactatcttttcgcagcgattgtcttcctgatcccgacatcgctcgttgcagccgaactggcggcaatgtttcaggataaacagggtggtgtattccggtgggtaggcgaagcctacggcaaaaagttgggattcctcgctatctgggtgcaatggattgaaagtacaatctggtatccgacagtattgacattcggcgccgtatccattgccttcatcggaatgaatgacgtacacgatatgtcactggcaaacaacaagtattatacgcttatcgtagtgcttgtcatttactggctggctactttcatttcattgaaaggtatgagctgggtcggtaaggttgccaaaatcggtggtatggtaggtacaattatcccggctgctctgctgattatcctaggaatcatttacctggcaaccggaggacagtccaatatggatttccatagtagcttcttccccgacttcacaaacttcgacaatgtcgttctcgctgctagtatcttcttgttttatgccggtatggaaatgggtggtatccacgtaaaagacgtggaaaatccttccaaaaactatccgaaagccgtatttatcggtgcacttatcacagttctcatcttcgttttgggtacgtttgcactaggtgttatcattcctgccaaagacatcaaccttacccaaagtttgcttgttggctttgacaactactttaaatacatccacgcttcctggttatcaccgatcattgctattgctctggcattcggagtattagccggtgtattgacatgggttgccggtccatcaaaaggtatatttgctgtaggtaaggccggttatatgcctccgttcttccagaagacaaacaaactgggtgtacaaaaaaatatcctgttcgtgcaaggtcttgctgtaacagtactgagcttactgttcgtcgttatgccttctgtacagagtttttatcagattttgtcacagctgacagttattctttaccttattatgtacctattgatgttctctggagctatcgcattgcggtataagatgaagaaactgaaccgtccgttccgtatcggtaagtccggtaacggtttgatgtggttcgtcggtggtcttggtttctgtggttcgttacttgccttcatcctcagctttatcccgcctagccagatttcaaccggtagcaataccgtttggttctctgtattgattatcggtgcaatcatcgtagttgttgccccgttcatcatctatgcgtccaagaaaccgtcttgggtagatccgaattccaatttcgaacctttccactgggaagtacaggctcaacctgctactgcaagtccgagtgttaccaagccaagcacaaccgcttccggtccgagttcatcaaacagctctgctccttcgagcggaagttctgcatcaaccagcacgtctctgggaagcggagacaaagataaggatacgcctaagtcataaagactaagtgttcattctacctaaaaaaagtaaagagtgccaaaaactaataataacttcacttctccttctttaagaaggggaataaagattacgactgctttttggcactctttacttattttcattaatttcttccgatgttgccttcaacggcaacacgaaccagaaagtagaaccttcgttcatttcagattccagaccgactctcccacccagactgcagacaatcgtttgtgaaagtgtcaatcctaatcctgccccctgcacctcacgatccaactttatgaagtagatttgttaatacccaaataatacgctgatgctcggagggcatcattatcagttgcaatcgcgactcacagaccaaagctaccacagaattattcgccagcttcatggcaaatacaccgcagtgcagcaggtctccgattcttcgtatcacgctctccgcaggtatgggaagaccatcttgaccaaacagcatttacctgcaaaaaaataagaaaagccagtaaaatagcaattacaacaaaagcagtcccatagttacacattttatatttgtttgaatgttttagtgtgtaaaattataaaatatacggtcttgcatttgagtacatatttatcccctaaaaagaaatccaggttttcatagtattattatttagtaaaaaattcccttcaagttattgcggtattaaaaaatatacttatctttgcacccgcaaacgagaaaggtgccatagctcagttggtagagcaaaggactgaaaatccttgtgtccccggttcgattcctggtggcaccactttcttaagcaatcggaatgtagcgcagttggtagcgcactacgttcgggacgtaggggtcgggcgttcgagtcgcctcattccgacaaggtaaagggtagctttctggaatacagcaagttaccctttattatttttaggctgtcgggacgtaaccggaacagccggactgaaatctatcaacctattatatcatgaagaacagattctacattttgacggcaacagcactctctttgctgtgtttcagttgcacaaagactcaagtggctcattctgagaatgagaagacaatcactccgcctatcatgggttggagttcctggaatgctttccgagtagatattagtgaagacattattaaacatcaggccgaccttatggtagaaaaaggtttgaaggatgcgggctaccactatatcaacgtagacgatggcttcttcggcaaacgtgacgacaacggaatcatgttcaccaacgagaaacgtttcccgaacggaatgaaaccggttgccgaccacatacacagtctcggcatgaaagcgggaatctatacggatgcaggcaataacacttgtggttctatctgggacaacgaccttgcaggagtaggcgcaggtatctatgggcacgaacctcaagacgcccagctatactttggcgactggggcttcgactttatcaaaatagactattgtggaggcgatgtcctcggactggacgaggaagaacgttatacttctatccgcaacagcattgacaaagtaaacaaaaacgtttccgtcaacatctgccgctgggctttccccggtacctgggcaaaagatgtggcaacttcctggcgcatcagtggagatatcaatgcacattggggatcactgaaatatgtagtcggaaagaatctttatctatctgcctatgccggaaacggacattacaacgatatggatatgatggtgatcggattccgtgacaatagcaaagtaggcggaaaaggacttactccgacagaagaagaagctcatttcggtttatggtgtatcatgagttcgcctctcctaatcggctgcaacctggaaaacctgccggattcttcactccaattacttacaaacaaggaattgatcgcactcaaccaagacccgttaggattgcaggcatatgtggcgcagcatgaaaatgaaggttatgtactggtgaaagatattgagcaaaaacgcggcaatgtacgtgccgttgcactttacaatccttcggatacgttatgcagcttctctgtaccgtttacctcactcgaatttggtggaaacgtgaaagtacgcgatttagcaagacaaaatgacttgggaaatttctccgatgtatttgaacgaacactgcctcctcacagcgctatgttcctccgcatggaaggagaaacgcgtctggagcctacattatatgaagccgaatgggcatacttacctctattcaatgatttgggtaaaaatcctaaaggcattatttatgctcatgacaaggatgcttccggtaagatgaaaattggattcctcggcggaaaaccggaaaactatgcagaatggcgggaagtatatagcacagacggcggacgctaccagatgactatccaatattcacacggcaaaggacgacagctggaagttgatatcaatggcgtcatcactaagattgccgcattgggggaagatgagaaacatagtcaaatcacaattcccgttgaattgaaggccggttacaatacgatccgaatgggcaatagttataactgggcaccggatatcgactgcttcacattaaccaaagtattataatacagtatataaaaaagagcaaagatgagacaagttcacttttgctcttttttatttcagacatataatcactccattaccgtcacacaagcttttccggttaaagatacatttaacttggaatcatttttctcaggaatccagatcatacgctcacactctcctttttgaagttgtacatttgcataatgtgcggttaaatattccgtaccgatatggcatttttcaacatttacagaccaattacccatcatacccagattcaaatacagattattaatagtcccactctgaaaatccacattcccgccactcctgatgacttgcaaagctgcaaaatcacaagaatcgaccacaatagaattagacgtatcaatggacaaagaatccttttccaaatgtttgaatcctattttctgcgaattaatatcatttataatacactccacatcttgcgtcatatccaatcgcatgtctcctatattcattcccataaatttggatttcttaaactcctgcggaagttgatccagcgaatagtccaaaaggattttcaacgtgtcccccataacggtcattttcagatagtcatttaccttcttcgagcaagaaaacagattcttcccttcttttgaaggctgcacttccagaagagaattcgccagccagacgttacgttctggcgtatacagccttgtttgagtcagccagaccacccggcaagccggcacttctttagttatctgctctccttgcaaattcagttgattggaaatgtatggccttcctaaacaaaaaatcataaacattccgcctaccagcacacaaagtccggctacaaaaagtcctattaatatataagttgtacgtttcataatatttattttactgttcttttttacaaaattcccggtacatatccgtgatctcctttataggaatatccagtgtcttgatttggcggaagaagtaatccagttcttccttcaaaaaagtattcttcctcagtgaatgaatcaattctctcgcaccggtggcgacaaaataaccaataccgcgtttattataaataatattctgtgactggagataatcgaatgagcgcatcaccgtattggcgtttacttccacaacagtagcatattctctgacagagggaatgcgttcctcctcagcaaactgtcctagaagtatctcatcacagattctatctgcaatctgtaaataaatagctttactttctttaaaattcatagtctaaagtattacatacgttgaatgatctcagactccttgaaacggaaataagcgagcgtccaatttacgaatgcaaaaagcataaagcccacagttaccatgacagtaacctgttccttcgttattgaagaaaaaatataaccataatctttactgcttccgctaaataacatatcccccaccaacattccgaccaatacgtaaattaaaacaattatcgtaacagaaacaaatgttttaagaaacgaatttttcggccatacagaactgcccaatacaaacaatgactgtacaaagcaatagatagaaagcaccagtgtcaactcatacgttttgtggaacaagtaccaccgtttcccgctacctaccaaatctcccagattgacaggaagtatcacttcttttacgtccggatagataagcgaataaaccaatacccgtgtataatcagccagttcaaaggtaatgaaaaaaacaaccaacaggacaacagttgataccaaccaacgagaaaagaatttctcaaaaggagtagccggtgtcattaatgcagacagcctgtttgtcttgcttttcatcttctccattgtcagcgacccgcttaaacaaccaaatccgaatagaaaccaaagaaaagctattaatataaatccccaggcaggatcggcctccatatgacgttcgagaaaacgaaccgaatcgtgagtacgatatgcaaaatatccgttccagaccaacacaacagtcatcaccccataaagcaatacaatacgaagtacattcgacttccaactctccaccatttccttgcggcaaagattcataaaacgaggcaaactaaaaaaagtatcttttatcatcgtcttttatttttgagtttgaaacaatcgggccatctcctcgggagcagccagtgtagcattaaaaagaagttccagatttatgtccgattcttccttctctttattaggaaggatcaggtaattaccctgaatagtaggaatggcaaaaagagctgtctgcgccagttcgcgatcatcactttctacaaagaaaagcttttcgcagatactacttgtcgattcgtccagcagtacacggctttcatccataatcagtacatgatcgagcaccttgtcaatatcacgaacctgatgtgtggaaatcacaatcgtcttatcatccgacatccccgatgcgataaacttacggaactggctttttccgggaatatccaatccgttcgtcggttcgtccatgagcaaaagcgaagtattcgttgccagtgcaaagctcataaatacttttttcttctggcccatggaaagcgaaccgaggttgatatccatatccatttcaaagtaatgaagatacttaatcatatcctccttgctaaaacggggataaaaagaactgttcaactcaatatagctgactaaagatacaggaggcagttcaaattcttcaggcactagaaacatatcctgcaaagttaccggcaaccggcggcgtacatccgtatcgtgaaacattaccttgccacctttaggagtcagcagaccggacatcagataaaggagagtggactttccggcaccattcttccccagcagtccatataccctgcccgattcgaacgagagagagaagtcgtgcagtacaacacgcttcgatttacgataagtaaatgagaggttttctactgtaatcatagcattttcttttgattatcaattgcattttagtgtattagtataatagtacaccgcaaatgtaggcaatcttttcaatattccaatagaaaagcaaaaaaaagtgtaaaaaaaggaggagctaagatcactctccactcctcctgtcacgacaaacaactaaaattattcactatttgatgccgtccaatgcccttttagcagtagcattagcggggtctatagccagaattttactccagtactccttggatttctccttattggcttttgcttccgctttcaatgtggggttttcaatagccaacaaataataatatccgagataactgtaacactctaccaacgccgaattgtaatgagggtcgttcttgctttccaacaatgcggctacttcttcatagaaaggtttcgccaatccctgcgttgtttcggggtcgagtgcagaatttgcacgtgctctccaaaaattgcctaaatagctatccggagcggcctctgaaatcacttggaaaacagaatcggcagacatcagtgcctgcttacgttcttcagcattgatagtcaacgaatcgggttgtgtacctgcaccataataaagtctgcccaactggaactgcaaatcaggagtctgcttttccttttcgagagacgagtaatatttatgatatgcaccgatcgcttttttataatcatttttctgctcgtaagcagaggaaatattcttatacaaatccgtctttgtcggatccagttccacagccttctcatattggccgacagcttcatcatatttcttcagttcttccagcaaatgtccgtaatacatatagtccagataagaataatccgccttatcacattcattaaagaaaacgtccgccgccttcaatgcttcttcaaagcgtttcaagtccgtattattatacatcgccaaacggttgaatgccgcatgacgcgggttctttttcaatcccatattagccacttcaagtgacttcgcaaaatcatgattcaagaacaaggcgaatgcatatttcaccagatcctcttcgttagccgtcggtcccattgcaaaacgggaataggcatcggccgccttactgaaatcgttcttcaaataataaatctctgctaatttcttgtctatggctgtgttggacggttcaagggtctttaattgattcagcttttctatggccagaccggcatttgctgacttataaatatcagcatatttcagatacgcaggcgtgcaacgcgaatcaaaataaatagcttcctcatacttctgtgaagcaagacctgcatttttctgcttggccgcaatatccccttccagcacggaagccaaagcagacttgccattcgcttttttagcaagagcagcgtacatttgtgcttcggacaacttgtcggcctgcaaataagcttcgccgatagctgtcaaaagttccacattctttttattttttccttttatcagttgttcagcttgctcggcagcttgcgccggatccgactgaatagtttctttcaactttgcaacttccatctgccattcggcatcggacgactgtgcgtagagcgacccaactgctataaacgctccagctaaaaacatttgtactcgtttcatgatagtcttaattttagttattattcgtctttcacatggacaatacgcaccggctgagtagccggaacaagtccagattttaatataatccgctgccctttatcggatgtcataaaagaagtgaatccccaaggcagcccactacgaggatcattcagtaatgcataaatcgatcttgccaacgggtagttaccataatacagataagcctgataaggtttgtagctgttgacaggagtcgccacatcctcggcactcaccgccataaccctgatctcctgccggaaagaaagattagtcgtatcactgcggtctcccaaccagtttactccgatcactcccattgctccgggattttccgccacataatttatcacctgttgatttgtcttcaacgcacttacattgcccgtagacaaaggtttcccgccacaaacagaatctattgcaaaacgcacggtgctagagtttttattatcaaacaccacctgaatatccttcaaacgggaattagggttcaccgctttccactctttcacttctcctgtcaggatacggcgaaaattacacacacttatcaaagaatccggattcgcacggttcacaatcaatgccagcccgtccgtagccagcttcatctcccgaggatagaacttccggctgtgaaacgaattcatttcttcctcggtcagtgtccgggttgtaatagccaaccggacactgtctttcagaagtaaattaatcgcctcgacctcagtcgtgtaacgagggacaattccggccaatggatacaggctttcaaatacatcaatctcttcctgtattatgggttcgaaactttcatccgccgcaatagctatcactccagacgaataagtatccgtcggtccctccttcgatttagagcggcaagcacttaataccgccaacaaaacgattcctatcagccaaaattgtctcttcatcatcatattattgtaacctgaacattaccggaacagtaaattttacgcgcaccgcttttccattctgcttacccgggatccacttcggcatactttttaccacacgtaccgcttctttatccagataagggtctaccccacgagccacacgcacatccgtgatcgaaccgtcgcgttctactacaaactgtataatcacgcgtccctgtgttccattctcctgtgcaatagtcggatacttgatattcttacccaaataagacatcagttcctgttgtccacccgggaaagtcggcatttgctctaccatatcaaacaccttttcgggttccggctcagcctgtgtcaccacttgtttcaagtcggcgatatccttgccgttggcttcgtcattaccttttacatcggcaatggaaatagccaccttggtagaagtcaactcttcctgactcttgatttcattatcctcgtgcacttcctcatctttcttgatgacgggagcagtaaacttgatggagcttttcaatgcaggaggtggaggcgcaacgggttccacccgtttcatctcttcctgtttgatttccggttctgccaatttcgacagagtagtgacctccgtcatcacttccttctgcttcggggttgccaacttcaccagcgtaggaatcgtaaatccgattaatgctatgaccaacactgccaacatcgcgagattatggcgcttagtcgagttagcacgcatcttgtatgcaccgtacgcttgattcttgccttcaaaaatcagttgacaccattcctgagaagttaaatctatttttgccattttacttttcttttttaggtgttacatcatttatcggctatattctgtgacagctctcccttagaatcaaaattcttaatcaagaatcgatccgcttcggcaatgtccgttatcacatatttaccaatattacatatctgcatttcgtccagtgcatcaatcagattcatataagaagcatcgtccgtcgccttgataatcacagtcggcgtatcttttccactctttatttcggaaacctgtttcttatattcttcatccgatatcttaagatcaagtttctgctgtttcaaagctctcactttattgacagcagttgcattcttttgaagaagtatgctacgcaacccatccgggccataagtagtctccttcaatgaggtataatccttatagttaggttctccctcataataatagagcttattgtccggccccagcagcaatgtgattgcctgcgaagcctttaccatactcttctgttcttcagttatattcttatcgttactcggcatgcttatctccatcgtctgaggtttgctcaacgtggtacaaagcataaagaaagtaatcagcaacatattcatgtccaccatcggagtaaagtctacccgtacagcaaatttcttctgcttgctctttccattttttccgccgctctcttgtacttcagcactcattgtttttcctcccttttaatcttcagattccactttgagcgaagtaatcagattataccgattctccctcaagtcctgaagtgagttcataacgttctttatcaccgagtatggagttgaagcatcagctttgatagcaattcgcaggtcagcgttggcagcacgtgcgttacgtacccatgacttgaactggttatcgacgctatcgcatggaattccctcattcttcagaatcttgtctcgttgttcttcgggaagatccaggaatttctgcatacttctaataggtactccgaaagtagaagacagaacaaaccgcttctcctgctcaggagtaaacttaataccatactcatcacccatgctctccaaaacagcctgcatatcctgctgtttgtcgaggctcataaatattttcccatccggatctaccagaatctgaagcacatttgtctccggaatcttaatttccgatacggaagccggagtgttgacctgtaccggttctttcttcacaaatgttgaagtcaacataaagaaagtcagcaacaatacggtcacgtcactcatagcagtcatatctatgaacgtacttttctttttaatttgcgctctacccatgattaatagattttaaagggtccgcagaattaatgagtagctgcaaaagtctgcacaatagagaatccgacttcgtcgagcccgtaagtcaatttgtcaattttgttagtgaagtagttgtaagaaataacagccaacgcaccagtcaagataccgaaagccgtgttaatcaaagcttcggaaataccttgtgacaaagccatagagtcggcaccaccacctgcagacaatgcggcaaatgaacggatcataccgattacagtaccgagcaatcccatcaatgttcccaaagtagtgatagtagcaataatcggaagattctgttgcatcatcggcatttccagcgtggtagcttcttccagttctttttgaatagccaacagcttttgctccttaggcaaagatgtgtttttttccatttcctcatacttgcgtagagtggaagttacaacattggcaacagaaccacgttgtttgtcacaaatttcctgtgcttttttgatatcaccggcagccaaggcagctttgatgttagcaacgaatttagccaaggaaccttttccgaaagcggaacgaagagcaaaataacgttcgatactcaaagcgagcacggttaacaacagtgtctgaataacaggcacgataataccacctttgtaaatagtacccaagaagtttccaggcaacggatgattgttaggatcattgttcataaagttggacggatttcctaataggaagtgataaatacaaactgctataataaaacagcagatgattacgataccggcattttttatacctacaatctgagattttttagtagtttccataataagtttttttgttaagatattaattttagttatttagaaaatttcaaaagattagatacactgcgctacagaccctgcgactttttgagcacaaaaaatcacacagttcatacagagtacgaaaagtaaattaatacggagaaaaagtgagaatactaaataaggatacgtctcaaagcgaatacatagtaatcgctggagataatggagtaatgtggatccttatccgaataataagatttactttgatctaatactaatgagttttctctcaacaaagaaaacttgtgcatcacgtcctttaaagaatcatttacttcaatgattctacgtagacgataattattagatgatgtttcggaaactgatttaaagcctaattctacatcggaaatagtcaatgactgagaagacttgtcgaagcctacagcgcggctatttaaaaaagaattggactttatatcggaagacgattcagacaactggcaagagctttcgcacttagaaacacatgaagcgaaatccatagcatttccaccgatgctataagatagcattagcagaatcgtggctaatatgaatttcagagaaactttcatggtatttctttttagttgtttatactagatctctttaatttcgcgacaaatgtagcaataaaaaagtatcagtttgtcgtcgttcacatcatttaagcttaaaagtttaactctattataaaaacaagcgttatgaacaatcagaattatggagtgataggtaattgccgcacgtccaccctcgtttcacaaacagaagccctctcttttatttttttcatagtaatcatcctgcaaagtttataaacagacgaagcccctccggtatttctactgaaggggcttcataaaaaacggcggctacctactctcccactgttacgcagtaccatcggcgtgacgaggcttaacttctctgttcggaatgggaagaggtggaaccctcgtgctataaccacctgaaaaaggttatgacatgacgaaaagtaaaatgaaagacatttgacaagctaaacgtatataacaaccgtcccgcagaaagaaagtggacgggcaattagtaatgctcggctatgatgttaccacctgtacacctgcatcctatcaacgtcatcgtctttgacgaccctaagaaatctaatcttgtggctggcttcgtacttagatgctttcagcacttatccaatcccgacttagatacccagcaatgcacctggcggcacaactggtaaaccagaggtcagtccaacacggtcctctcgtactagtgtcagagccacgcaaatttcatacgcccacgatagatagagaccgaactgtctcacgacgttctgaacccagctcgcgtgccactttaatgggcgaacagcccaacccttgggaccttctccagccccaggatgtgacgagccgacatcgaggtgccaaacccctccgtcgatatgagctcttgggagggatcagcctgttatccccggagtaccttttatcctttgagcgatgtcccttccatgcggaaacaccggatcactatgctctagtttcctacctgatcgacttgtatgtctcccagtcaagcgcccttatgccattacactctacggacggttaccaatcgtcctgagggcacctttagaagcctccgttacacttttggaggcgaccaccccagtcaaactacccaccaaacagtgtccccgttacaacgggttagaactcaaataatcaaagggccgtatttcaacagcgactccacacaaactggcgtctgcgcttcaaagtctccggcctatcctacacatcaattacccaaattcaatgttaagctatagtaaaggttcacggggtcttttcgtcccatcgcgggtaatcggcatcttcaccgatactacaatttcactgagctcacggttgagacagtgtccagatcattacaccattcgtgcaggtcggaacttacccgacaaggaatttcgctaccttaggaccgttatagttacggccgccgtttactggggcttcaattcaatgcttctcttgcgatgacatctcctcttaaccttccagcaccgggcaggtgtcaggctgtatacgtgatctttcaatttggcacagccctgtgtttttgttaaacagttgcctggacctattctctgcgcccaactctcgttgggaccctttatcccgaagttacagggtcaatttgcctagttccttaaccgtgaatcactcaagcgccttagtatattcaacccgactacgtgtgtccgtttgcggtacgggtacctcaaggattaagtttagcggattttctcgggagtatgtttacacgcactattaccgtttcccgaaggaattggtatactatcaggttcgactctcgtggtggatttgcctgccacaatcaacatctacacccttcaacggactattccgtcagtccgcggcgttgtcacgactccgtctccacgtcactccttaaggtagtacaggaatattaacctgttctgccatcggcctcaccgttcggctgagccttaggacccgactaaccctgatccgattagcgttgatcaggaaaccttagtctttcggcgagggggtttctcaccccctttatcgttacttatacctacatttgcttttccacacgctccagcaaagctcacgcttcaccttcgacgcggagtggaatgctcccctaccgatcattaatgatcccatagcttcggtaagatacttgatgcccgattattatccacgccaaactcctcgactagtgagctgttacgcactctttaaatgaatggctgcttccaagccaacatcctagctgtcttagcaatctgacttcgttagttcaacttagtatctatttcgggaccttagctgatggtccggattcttctcctttaggacatggaccttagcacccatgccctcactcctgtgatagaactaatgcgcattcggagtttatcaagacttgataggcggtgaagccctcgcatcttatcagtcgctctacctcacattagtaactcacaaggctgcacctaaatgcatttcggggagtacgagctatctccaagtttgattagcctttcacccccaccctcagctcatccggaagcttttcaacgcttatcggttcggtcctccagttagtgttacctaaccttcaacctggccaagggtagatcacttggtttcgcgtctactccttccgacttatcgccctgttcagactcgctttcgcttcggctacggatctccagatccttaaccttgccggaaaaagtaactcgtaggttcattatgcaaaaggcacgccgtcacagcataagctgctccgaccgcttgtaggcgcatggtttcagggactatttcactcttctattcgaagtgcttttcacctttccttcacagtactggttcgctatcggtctctcgggagtatttagccttaccggatggtcccggctggttcacgcaagattcctcgtgtcccgcgctactcaggataccactacgcttcgttcagcttcgaataccggactatcaccgtctatggtttcattttccaaagaattcttctcactgaatgtcttgcgacaacgtggtcctacaaccccaatattgccgtaacaacattggtttgggctaatccccgttcgctcgccactacttggggaatcattattattttcttttcctacaggtactaagatgtttcagttccctgcgttagcctcctgccaagcaggatgacattccttcagaatgtcgggttgtcccattcggaaatcttcggatcaaaggttatttgcacctacccgaagcttatcgcagcttatcacgtccttcatcgcctccgagagccaaggcatccgccatgcgcccttgcttactttctttcaaactgactgctccgaaaactatccattactgaaatgggaaatatcggagagagtacggtttgatatatacttttagctctttacttttattttactttttgtacatcatgtcaaagatcgtttcccattgctggggatgtggagaataacggattcgaaccgttgaccctctgcgtgcaaggcagatgctctagccagctgagctaatcccccgtaagagtcgtttcggagtagtcccaggcagagttgaactgccgacctctacattatcagtgtagcgctctaaccaactgagctataggactagttcaaccgtgtctgtctttagactcggcttctgttttctcttgtttatctctatctatattactatagatggttgatctatatattataaataaacaagtaccagtagtacaatctgaacagaacccggttcaatattcccctaaaggaaatgaaccatgaagtcattgtaacgacatcgctccagaaaggaggtgttccagccgcaccttccggtacggctaccttgttacgacttagccccaattaccagttttaccctaggacgctccttgcggttacgtacttcaggtacccccggctttcatggcttgacgggcggtgtgtacaaggcccgggaacgtattcaccgcgccatggctgatgcgcgattactagcgaatccagcttcacgaagtcgggttgcagacttcgatccgaactgagagaggtttttgggattggcatcctgtcaccaggtagcggccttctgtaccccccattgtaacacgtgtgtagccccggacgtaagggccgtgctgatttgacgtcatccccaccttcctcacatcttacgacggcagtctctccagagtcctcagcatgacctgttagtaactgaagataagggttgcgctcgttatggcacttaagccgacacctcacggcacgagctgacgacaaccatgcagcaccttcacaaatgccttacggcctatgggtttccccataattcatttgcaatttaagcccgggtaaggttcctcgcgtatcatcgaattaaaccacatgttcctccgcttgtgcgggcccccgtcaattcctttgagtttcaccgttgccggcgtactccccaggtggaatacttaatgctttcgcttggccgcttactgtatatcgcaaacagcgagtattcatcgtttactgtgtggactaccagggtatctaatcctgtttgatacccacactttcgagcatcagcgtcagttacactccagtgagctgccttcgcaatcggagttcttcgtgatatctaagcatttcaccgctacaccacgaattccgcccacctctactgcactcaagactgccagtatcaactgcaattttacggttgagccgcaaactttcacaactgacttaacaatccgcctacgctccctttaaacccaataaatccggataacgctcggatcctccgtattaccgcggctgctggcacggagttagccgatccttattcatatggtacatacaaaaatccacacgtggaccactttattcccatataaaagaagtttacaacccatagggcagtcatccttcacgctacttggctggttcagactcgcgtccattgaccaatattcctcactgctgcctcccgtaggagtttggaccgtgtctcagttccaatgtgggggaccttcctctcagaacccctatccatcgtagtcttggtgggccgttaccccgccaacaaactaatggaacgcatccccatctcataccgaatttctttaatataaaacccatgcgggaaatatatgctatcggatattaatctttctttcgaaaggctatccccgagtatgaggcaggttggatacgtgttactcacccgtgcgccggtcgccagctttggtttgcaagcaaaccaaactgatgcccctcgacttgcatgtgttaagcctgtagctagcgttcatcctgagccaggatcaaactcttcattgtaaaagtattttttaatcggcatatgccggttatagctctgttcaggatgccgtacaatttattgacttcattctaatacctatatctatcacatatatatgaacatatataacagattgtattgacggttctatcttttcttgtactacttgtattgtttatcaatatttcaaagaactaatgtggccttcgccgcactgctttctttacgaaagcggatgcaaagataaggactttttcagataacatccaaacttttttcgaagttttttggtttttattttccgaaccctttatcattagcagaatgtcaatcattaggctctgtctctctagcaaagcgggtgcaaaagtagacaacttatccataacatccaaatatatatgactatttttctaatcttttttgaaacttttttgtaacacgctgattgacaaggatgttgtagaacataaattttactgcagggagaacccatgtagaatgactacacattattatattcacacgcgagaggaagggaagggaatgagactgtagaaaagaaataagtactgtaagcaaatttattcggtttctcaaaaaacaatgctgatacataaagttgataataaccgattctggcattcacctaccacctccccctacggggactcctccttccagaaggaggagaatagaggatactatcgactataaactagcaaatcattattttacagattcaacttacaaacaaattggaagaaaaactgattcatcaaattcatttctcatattctcatactttcggaataacgcgtttattatcagataaatgatgtatgagaaataaaataacagacagccatttctcatagtattcgggattatttctcatagaattcgttgtgttctcatatagcttcataaatcaaatttcaatatacgacacatttgaactaatattaaattgtagaatatagactgttaaataaatggtaaataccttatagttagagactcttcacctatttataacagataatcgataagacatataattcgttccactacagtgaatagttctgcgcactctagtagcaagaaccggctactagagtgaaaaagcctgtgcactgaagtggaacaaaagagatgatagtagaaattcacaaggataaaggcataatataacaagggcattaggatagaatatggtatgtaaagggaagacttcagaaaaagaagcatatatcaggagaacaatatggagtagtgagaaaaagaacggggggctatgagaaataaagaagaaagagtatgagaaatgactgaattatgagggaaaacaacagaaaaactatgagaaatacctctgtgttattttatttctcatacatcatttatctgataataaacaagttatcccgaaagtatgagaatatgagaaatgaatttgataaattcggttcttcttcaaatttggtggtaatttaaccagtcgtggtatctctattcccctccttcggggagtggctgaaagccggggtggtaagtagatacacaatgctgataataacagacttacgcattcacctaccacctccccctacggggactcctccttcccgaaggaggagaatggagaatactatcgattatcaaattattattttcctaattaattttgccaccaaatctgaaaaagaacctttactacatgaatcagacgagaaaccaaagaattattctttctgttaaaacctccacaagcgataaacaaaaatatcccccggctgttacataggcaacttaaacatattaacctaaacataaaaattatggctagagaaagtgtaaaaatcctacaagggaaattggatgtagaaagtttgatttcacagttgaacgcagcattagctgaggaatggttagcatactaccagtattgggtaggtgcattagtagtggaaggcgctatgcgtgccgatgtacaaagtgagttcgaggaacatgccgaggaggaacgccgccatgcacaactactcgccaaccgtatcatcgagttagaaggagttccggtactggaccctcaaaaatggttcgaactagccagatgcaaatatgatgctccgcaagagtttgattcagtaagtttattgaaagacaatgtggcttccgaacgttgtgcaatcattcgttaccaagaaatcgccgactttactaacgggaaagattttaccacctgtgacatcgcaaaacatattcttgctgaagaagaagaacatgaacaggatttgcaggattatctgacggatattgtcagaatgaagaaatcatttctcgaaaagtaaattctaatttaataatgattaggtaagagaggggcatccatttacaggatataccctcttttatgtatatagtacgataaaaacaaaactattttagagtaaatcaagaagaaatctttcttttttcgtatttttgtcccaatatgcacgtttaatccaaataggtaacgaacatttgcgaagagaatgaaagtaattgatttaataaataacagcaaaaaaacagccttttctttcgaaatcctccctccactgaagggtacggggattgaaaagttatatcaaacagtcgatacgctccgggaatttgacccgaaatatatcaatatcaccacgcatcgcagcgaatacgtatataaagacctcggcaacggcctgtttcaacggaaccgtttgagaagacgtccgggaactgtcgctgtggctgctgccattcagaacaaatataatatcaccgtagttccgcatattctgtgcagtggtttcacacgcgaagaaactgaatatgtactgcttgatctccagtttctgaatatcaccgacttgttggtgctgcgcggagacaaggcgaagcatgagtctgtatttactccggaaggcgacggataccaccacgccattgaattgcaggagcaaatcaacaacttcaataagggaatctttgtagacggttcggagatgaaagtcaccgccagtccgttctcttatggcgtagcttgttatccggagaagcatgaagaagctcccaatatagaatccgacctctattggctgaaaaagaaagtggaagcaggtgcagaatatgccgtgacgcaactattttatgataataagaaatatttcgaatttgtggaacaggcaaaggcggcgggtatcaacatccctatcattccgggaatcaaacctttcaaaaaactatcccaattaagcatgattcctaagacatttaaagtggacttgccggaagatttagtaaaggaggccttaaaatgcaaaaacgatgctgaagccgaacgggtcggtatcgaatggtgcgtgacacaatgcaaggaattgatgtcccacggagtcccaagtattcatttctactctatcggagcagtagacagtatcaaagaagtagccaaaatcatttattgatatgttttttagagacgtaatcggacaagaagaaatcaagcgacggctcattcaggaagtgagagagggacggattccgcacgcccagctcatctgcggcccggaaggagtcggaaaaatgccgttagctattgcttacgcacgttatatcagctgcaccaaccggggcgagactgatgcttgcggcgtctgtccgtcctgcgtaaaattcaataagctggtacatccggacgtacattttgttttccctatcgtcaaaagtgcgaaggggaaaaaggaggtatgcgatgattatatcgccgactggcggccgtttgttatcaacaatccctatttcaatctcaatcactggctgaacgaaatggacgccgaaaactcgcaagcattgatttatgccaaagagagtgacgagatattgaagaagctcagtctgaaatccagtgaaggcggatttaagattacgattgtatggctaccggaaaaaatgcacccggtatgtgccaataaattgctgaaattactggaagaaccacccgagaagacggttttcctgcttgtatcggaagcgccggatatgattctgccgactattctgagccgtacacagcgtatgaatgttcggaagattgacgaagccagtatcgaccggatattacagtcaaaatatagcattcagcctgccgacagtctttccattgcccacctggcaaacggtaattttataaaagcgcttgaaacaattcatctgaacgaggagaaccaacagttctttgatttattcgtcagcctgatgcggttgtcttatcaacggaaaatcagggagatgaagatgtggagcgagcaagtggcaggtatgggacgcgaacggcagaagaactttctggaatattgccagcgcatgatccgggagaactttatcttcaacctgcatcaacgcgaccttacttatatgactatcaacgaacagaattttgcaatccgctttgctcctttcgtcaacgaacgtaacgtcatgggtatcatggacgagctaagcgaagcacaactgcatattgaacagaatgtaaatgctaaaatggtatttttcgacttctcattgaagatgatcgtactgttgaagcaataataaatatataaactatggaatataaacttcataatgggagcggcagcctttgttgcaaaggatgctcccgccaagataaaaagctgaacacctacgattggctggcagacataccgggcaatgcggaagaaagtgatatggtagaggtacaattcaaaaatacccgcaaagggtattatcgcaacagcaataaaatcaaactggaaaagggagacattgttgccgttgaagctgcccccggacatgacattggcgtagtaacccttaccggcagacttgtccccctgcaaatgaagaaagccaacttcaaagcggatgcggaaatcaaacgaatctaccggaaagccaaaccggtggacatggagaagttcaacgaagcaaaagataaagaacacgctaccatgatccgtgcacgccagattgcattgaacttgaatctgaacatgaaaatcggagatgtggaatatcaaggagacggtaacaaggctatcttctattacatcgccgacgaacgggtagacttccgccaactgattaaggtattagccgaagctttccgagtacgtatcgagatgaagcagatcggtgcccgtcaggaagccggacgtatcggtggaatcggtccttgcggacgtgaactttgttgtgctacctggatgacgagttttgtttccgtatctaccagcgccgcacgtttccaggatatctcactcaacccccagaaacttgccggacagtgtgcaaaactgaaatgctgcctgaactacgaagtagactgttacgtagaagcacagaaacgtctgccttctaaagagattgagctggaaaccaaggatggtactttctatttcttcaaggccgacatcctcagcaaccaagtttcttattctacagataagaacttccctgccaacttagtcactattagcgggaaacgtgcttttgaagtgatcggcatgaataagaagggtatgaaaccggacagcctgcttgaagaagaaaggaaagcggagccgaagaaaccgatagacttgttggaacaggaaagtgtaacccgtttcgaccgtagccgtaataacagtaaggaaggaaataacgccaaccgaaacaagaaaaagaaaaaaggaactcccaacaacaaccgaccgcaacaacaagtagaagggactaatcgtccgcagcaaccgcaacgggaaaacgagggtcgtccacaacctgcggaaaacggaaacagaggagatcgggaaaacagaccaagaaataataataacaaccggaacagaggacaaaaccagggacggaataatgagaacagacgtccggagagaagacaggaacggccacaaaaccaggaacgcccgcaaggtcaggaacgtgaacgccctgcaagaccagaacccagaccggaaagatacccaaatcaagcgaaaccgcaaaataatgaaaagccttctcaggaatagtttattctgtctgctcggtatttgcctaatggctgcctgcaatgagaataccgtgtatcactcctatcagtcccttcccgacgaagggtggggaaagagtgatacactctcttttctgattcctgtcaccgacagtattccgcctacactcagattattcgcggaggttcgcaacagaacagattacccttatcataacctgcatctatttatcagtcaaaacctgcaagactctacggtatggcggacggatactattactataaacctggctgattccacgggaaggtggatcggaaatggttggggaagtatctatcaatcagcggtctttatcaaatccgtacgtcctttgtatcctgctaattacaccttcaaaattatgaacgggatgaaagatgagaagttgtccggaatcaatgacattggtatccgaattgaaagacaggagaattagaaaataaacgaactagagtctcctgccgcgccctgcatctatccgcaggaaaataaacagcaatatcgtaaatccccataaagaagaacctccgtaactaaagaagggtaatgggataccaattacaggagtcagccctaacaccatccctatattgataaataggtgaaagaggaaaatactcacgaccgaatacccatatacgcgaccgaaagcagacggttgcctttcggaaaggaatatcaatctcaatatcaaaataagaaaagccagcaagaccgcggccgaacctacaaacccttgttcctctcccaccgtacagaaaatgaagtcggtatcctgctcagggacgtatttcaatttggtttgcgttccgttcaaaaagcctttccctgtcaatccgccggaaccgatagcaatcttggactggtttacattgtagccggcaccggttaaatcttcttccaaacccaatactactttaatacggatttgctgatgcgactctaatatattatcgaagacatagttactggaatataagaatccaatggagccgattgagaataaagcaatcaggaaataagagcgctgacgctcgctcaatgccaagtaaatcaaataacctaccacaacgacacaaagcccccactgcacccagaccagactgaaatggatccaatattcggatatcagataagcgataagcaagacaatcaaacttcctccgataatattccgggcaggttcccaccgcttgcggtatacccacaccataccaccggcaaataataagatcagcagcaacacaataaactctcccaacggagtcggtgtatcggctatgaatacttcatcgaagcggatgcctaccacaaaatagatgaccgcacatacccccgaaaaaagtaccacacccggcattccctcccggtaaagcaccaagaagaaagcaagatagaccaaggcagaacctgtctcccgctgaccgataatcaacaacatcggaaggaggataataaaacccagtaccagagcacatttctctttctttatgctgaatgaataggagtttatatatttggccaatgccaatgcggtagcaaacttggcaaattcggctggctgcaggctgacaggccccattaccaaccaagaacgggagcctttggtatccggcgcgataaaaatagtaacgataagcaaaattatcattcctatatatataatgtacgcgaacatatcatacatccggtcttccaacatcaacaacacgaaaccgagaccgaaggaacagataatccagacaaattgcttgccggcacgggtagagaagtcgaggaagtcacgatcaccatagtcatagctggctccacagacactgaaccacccgccgacaatcagaagcaggtaaatgcaaatcgttacccaatccagtgatttccacaaactatcgttcctcgttaccatacaatatcactctgttactaaattcttctgctctcaattcattctcgggagatagtttgcctttcaagtactgctccataagcaatgccccgaaaggtactccgtatgtagctccccaacctccattctccacatacacggcaatggctatcttcggcttgttcatcggtgcaaagcccataaatacagaatggtcatgtccgcggttctgtgccgtacctgtctttccacaagcttccaagtccggaaccattaccgacaacatacggcaagttccgcctgtggcagctccgcgcatcccttccaccaccgattcataatgccgtttctcaattgtagtataacgtggcgtacgataaatactatccaactgattatcttgaatctccttcacaatatgcggtgtgataaaatatccgcgattggcaatcgttgcacccagattggctatctggagaggagtagccagaatttctccctgcccgatcgaaatactgattaccgtcagtccattccaatggccgcgataagccttatcatagaactgtgcattcggaatcaaaccacgtttctctccgggcaaatcaacacctaacttataaccgaagccttgggaaaccatgtgatctttccagactgtaattgcgttttgcggtgaaccgtatttacggtcgccgaacatacggaacagtccccaacaaaaataagagttgcacgatgtagcaatagcaggaataagtggtatcggtgctccgtgggcatgacatcccaccgtcagtctgccgtaatggaaaccgcgcgaacaagggaaagaaggaccctgctcagtcacaatgccttcctgcaaaaaagttaatccctgtgccgtcttaaaagtagaacccggaggatatactcccatcaatgcacgattcagaagcggtttcatcttatcacgctgcaacatcagatggttctttccacgctgacggccaatcatcaaatgcgggtcgtaattcggcgaagataccagacaaagaatctctcctgtctccggctcaatagcaacaatacttccgatcttatttttcagtaaccgttcacccaacatctgcaagtcaatatccaaactgagtgtcaagttctttccgggtacggaaggacggtcatattctccgtccatataatgcccctgaatacgtccgtgcgcatcacgaagcagaatttcaatgcctttctctccacgcagatacttctcatacgatttctctacacccaacttaccgacataatcgccacgaatgtagtagccttcttcatcggcttccatttcttttgccgagacttctccaatatcacccaaggcgtgcgcggcagcatcataagagtattggcgaatcgtacgccgctggatatagaagccacggaatttaaacaacttctcctgaaagacgccacattcttccgccgaaagttgcgacataaacaattgattagtgtatctggaatatcccggattccggcgacggtctttcatgtcgctcatgattttcaggaattgagcacgagtaatattcaacgactggcacaggtcgagtgtatccaagttctctacttctttcgggacaatcgttatatcataagcaggctggttaaaaaccagcaacttacctgtacggtcatagatagctccgcgcgaaggatattgaattttattcaggaacgcattgctatcggcgttcttcttataatcatcggtagtaatctgcaatacaaaaagacggatcagataaatcagcacaatagacagtgcaattcccccgataacaaatttccgtttctccagtctataatcttttgccatcgctatctccttatgccttccacagctacaatacaagttacagtcagaacggtacacaatgccacccgcagcagcaacagccaaataccggaaaacgagaagaactcaatagagagtaaagccagactatgtataaaaacacttgcagtagtatatttcagaaaaggagtgattcccatactcttgaaagaaggtacgagattgtcctgattatcgcggggagtgaacaaacgcaataaagaaggacgaagaaaagcaagcaacacggttgctgctgcattcattcccggagtatcggaaaacacgtcaatggtaagcccgaaaaagaaggcccacaacatcagttcattccgggaagtgccggaattgaacttcaaaataaaataaatatagagaaaaggcgtagcatatccggctatatgcacattattcagaattagcacctgaagaagcaccaacccgataaaccaaccgattctatgtatataggtaataatcattgtttcgttgtcttgttttcgagttctttctgctcctgctgaccgttccgcgctatcacccgcacatcactaagcttgccgaaatcggtagccaacttgatcttcagcagataggataatccatcatgagagtcggacatatcatccaccgtccccaccataattccttcgggaaatacagtcgagaaaccgcttgtcactacggtatctcccagattaaactcggcatgacgaggcaaatctttcagataagcgtatcgcgaatctccgtgttcccacttcagataaccaaaataatcgcttcctacaatcttgcaactgatgtttgatttgctattcagtacagaaatcaccaccgaataggaaggagatgtttcgtaaacaattcccacaatcccgtttccgtctaccacgcccatttcggaatgaatgccggaagaagaacctttatcaagcgttatataattatcggccaggttcaggctattcttaatcacacgtgccttaaacagctgataatctttctgaggcatcttccggatactgttcaccgcgatagaatcgagttgacgttctttcaacgctttttccaaattattgatctgctcttccaataacatattccggtccagcaggtcttcattgaccgatttcaggtggaaataggaagatatacctcccgaaacttcataaaccgcccccacaactgtattggcagaagtgaaataagcactctgctggtaattgttgaaccgaaataacaaaacaaaactggctacctccaatatgacaaagaggaaccagtaattgtatttcaaaaggaagtttattaaattccgcatgaatcagagtccgtgattttatctcattaggaaagagaaacgatctacattctttaatgctacccctgtccccttggcaacagcgtgtaaaggatcttccgcaatatggaacgggatatttatcttatcagtcagtcgcttatccaaaccacggagtaacgcaccaccaccggccagatagataccattatgaacgatatccgcataaagttcgggaggagtattctccaatgcactcaagatagccgtttcaatcttggaaatcgatttctccagacagtgagccacttcctgataacataccggcacttccataggaagggcagtaatacggttcggaccgtgaacgatataatcttccggagcgtcttcacccagttcggtcaaagccgcacctacattaattttgatacgttccgccatacgctcgctgaccttcacattatgctgacggctcatatattcttgaatatccgcagtcaagtcatcaccggcaatacggatagagttgttggaaacgatacctcccaaagagataacggcaatctccgtagagccaccacctatatcaacaatcatgtttccttccggagcttccacgtcaataccgataccgatagctgcagccatcggttcgaaaatcagatagacatcacgtccgccagcatgctcggcagagtcgcgaacagcacggagttcaacttccgtacttcccgacggtacgccgatcaccatacggagagagggtgagaaaagatgattgcgggtgtttacctgcttaatcagaccacgcatcatctgctcgcaagcatagaagtcagcgattaccccgtctctcaacggacgaattgtacgtatattttcgtgggtcttttcatgcatcaacttcgccttttctcctacggcgatcatcttatccgtacggcggtccaaggctacaaccgaaggctcatccaccacgattttcccgttcgtgatgataatggtattggctgtacccaagtccattgctatttcttgtgtaaaagagaataatcccattcttgattcttgtttttaatgtttaaaatgacggataccggtagtcaccattgccatgccatgttcattgcagtaagcaaaagacaaatcatctttcactgaaccacccggctgaattacagctgtaattccttctttatcggcaatttccacacagtcagggaacgggaagaaagcatccgaagccattactgcaccattcaggtcgaaaccgaatgatttagctttttcaatcgcttgcttcaatgcatccacacgtgaagtctgtcccacaccgcttgctaacagttgtttacccttcgccagtacaatagcgtttgatttactattcttgacaatcttgttagcaaacagcatatcctctacttcttccggagtaggagccttgtcggtcactgttttcaagtcggctaccgtttcaatattagtatctttatcctgcaccaatacgccgttcaacaaagcacggaactgcttcttcggcagtttggcctccttacgtacaagaatgatgcggttctttttctgtcccaggatttcgagtgcatccacatcataatccggtgcgataatcacttcgaagaaaatcttgttaatttcttctgctgctaccttgtcaatgacaccgttagtaatcagtacaccaccgaaagcagatacaggatcacctgccaatgcatctttccaagcctccaacacagtaggacgggaagccaggccgcaagcgttattatgtttcaggatagcgaaagtaagatcctcgaactcgtcgatcaagtcaacggcagcgttgatatcaagaagattgttataagaaatttcttttccgtgaatctgatcgaacattgcctccaggtttccgtagaaataacctttctgatgtggattttcaccgtaacgaagttgtttctggctgttcaccgaacaacggaaggcagaaccttcgccggcatcgaaataattgaagatagccgaatcatagtgagaagaaacggcaaacgcttcttttgccatccaacggcgttcttcgagtgaagaagtggctccgtgctccattaacatatccagcaatggcttatactgagcctgagaagctacgataattacatcgttgtaattcttggctgcggcacgaatcaaagagattccgcctatatctattttttcaataatatccgcttcagatgcaccggaagcaacagttgcttcaaacggatacaaatcaacaattaccagatctatttcagggatctcatatttctcaatctgctgcatatcttgttccagaccgcgacgacaaaggatacctccgaagatcttcggatgcaatgtcttcactctaccacccaaaatagaaggataagtggtcaaatcttccaccgccttacagggatatcccaacgattcaataaactgacgagttccccccgttgacagaaactctactccctcttcatgaagtttggtaataatttcgtccaaaccttccttgtggtatacagataccagtgcagtttttattcttttagactctgacattgaattgcttattaagtatttgacgcgcaaagttacgaaatattgtttatcgtacgtaataataaggtgtgaattaataaaaaaaagcgttgactcttccggaggaaaagccaacgcttctttgcgcatacagtttatattcagaatttattaccagatagatactcgtttttcttttggtacaaacatggaatcttgttcggtgatattgaatgcttcgtaccagttggcaatatgaggtaatgcaccgtccacgcgccattttcctaatgagtgaggatcgagtttcgtcaaacggagaatttcttccggacgaatatttcccgcccacacatttgcataagcaaggaaaaagcgttgttccggtgtaaatccgtcaacaacttccaacggtgcggtttccattgctttcttgaaagcatgataagaaacttgcagtccaccatggtctgctatgttttctcccagcgttaggctaccgtttgcatgtactcctggagcgacctcaatactgtcaaagaagttcaccattacctgagcacgttcctcgaatttcttggcatcttcttccgtccaccagtctttcagatttccgtctttgtcatactgacgtccctggtcatcaaatccatgtgtcatttcatgaccgataacaactccgatagcaccgtaattcattgcatcatcagcattcatatcaaagaatggaggttgcaggatagctgccgggaagcagatttcattggttgtcgggttgtaataagcattaacggtctgaggagtcatcaaccattcatccttatctaccggtttgccggctttggaaatcatctcggcatacccccattcattggcacgttcgatatttgcccaataagaatcgtttttaatatccaaggctgagtaatctttccaggtatcgggataaccgatcttgacatggaaggtagccagcttctcctgtgcctttgctttggtcggttcgctcatccattcaagagcattgatgcgttcgcccaaagaagtctgtaagttcttcaccaacgttaccatacgttctttggcagcagccgggaagtatttctcgacatacatctgccctactacttcaccgagagcaccgtctaccgtacttacagcacgtttccaacgaggttgcatctcttttttgccggacattgtcttgccgtagaaatcaaaatcctgcgctacgaagtcatcactcaagtaagaagctgccgagttaatcagattccattgaagatatagcttttgctcatcgagggatactgtattaataacgtccgccacttctttcatagctgccggctgaccaacattcacttctttcagatcatttaagcctgatgtagtgaagtaaacatcccaggcaaatgtagggaagttctttttcagcgtctccatatccattttattgtaattagcatgagggtcgcgcaactctacctgcgaacgggctgacttggccaaacgagtttcgatattcatcaccgcttttacagctttttgtgcagcagcctcatcataaccagccaactgaaacatcttggcaatatgttcctgatatttatcacggatattctttgtttgctcgtcattctccagataataatcgcgttgtcccattccaatacctccctgataagtctgaaccagattcatcgaactgttcatatcatcagcaccgatatagaggctaaaataaggattaattcctttcttctgaatttcggcgatgtacgtataaatttcacctttatcttggagggcgtcgatcgcttccagttcagctttaattggagcaaccccttcctgattcagtttcacgctatccatggcgatattgtaaagatcacccactttctgagcggcactgcccggtgcgttgtctttctttgcagccagttcggcgattaatgttttcaactgctcacggctgttttcacgcaacatatcaaatgttccgaaacgtgaatactcgtcagtcagcggatgagctgcaacccaaccgccacaagcgtattgataaaaacttgtacccggcatagccatggtatccagattagcaaggtcgataccggatgttagcacggcctctttcttactgttacatcctgttgtcataaggcatacggcaagaattggtaaatacttagttactttcatattgcatacataataatttatcattttttcgcgtcttccagctccaacgagacacgttcccattcttctacgatagcatccaactgctgtttcaatttctgatgccgctcatagagttgcatatcagaggctccttcgggagttgccatttgtgcttcaacaatagatattgccgcttccgtctcttctatcgaagcctcacaatcagccacttggcgttcgagtttcttcagttttttattcaactccttctgtgcctcataagagagtttattctccgaaggttgtaccggctcttgctcacttcccttggcagaagccgtaggcgaagaagataaagatgctcctttctgaagttcattcaggttctctatctttttcttttgaaggaactcatagataccgctgagatgttcttttacatgcccgccaccaaactcatatactttagtcgcaagtccgtccagaaaatcacggtcgtgactgacaagtatcacagtaccgtcaaactcacggatcgcctctttcaacacatccttcgagcgcatatccaaatggttggtcggttcatcgagaatcaggaagtttacaggctcaagcaaaagcttaatcatcgccagacgggtacgttctccaccggaaagtactttcactttcttatccgaggcttcaccgccaaacatgaaggctcccaatatatcccgtattttcaaacgtatatcccccgttgccacacggtcaatcgtatcaaataccgtcagattttcgtccaacatttgtgcctgattctgggcaaaatatccgatttgcacattatgcccgattgtcaacttaccgtcgaagtcaatctcacccatgatacattttaccaaggtagacttaccttcaccgttcttgccgacaaaagcgaccttctctccccgattgatagtcagattgacgtcgtggaaaacgacatggtctccatacgctttgcgtacatcctcacaaatcaccggataattaccgctgcggctggcaggaggaaatttcaaacgtaatgccgaattatcttcctcatccacttcgatacggtcaatcttttccaattgcttgatacggctttgtacttgtactgccttcgttgctttataacggaagcgttcgataaagtcttccgtatcctgtatttgtttttgttgattttcgtaagcacggagttgttgttcgcgacgttccttgcggagaacgacaaactcatcatacttcaccttatagtcataaatctgcccgcaagtaatctcaatcgtacgggtagttacattattaagaaaggcacggtcgtgactgaccagtacaacggcattggcacgggtcgccagaaagttctccaaccactgaatactttcaatatcaagatgattggtcggctcatcgagcagaagtacgtccggacggcgaagcagcaacttcgcaagttcgatacgcatacgccaaccaccggaaaattccgaagtagggcgttcgaagtcctcacggctgaagcccaatcctagaagcgtccgttctatttccgcctgatagtttgtaccgcccatcatcaggaagcgatcattctcatgcgtaaaacggtctattaactggtgatattcttccgattcatagtctgtccgttctgccagttcccggttcatccgctccagtctcgcctgaagttcaaaaatatgttcgaatgccagttccgcctctcccatcaccgtccggttatcggcgagaatcatcacctgcggcaaatatccgatcgtgacatctttcggagtagccactactccatgtgtcggtgattgcaaacctgccaatattttcaacattgttgatttacctgcaccattcttgccgaccagtgcaatacggtcttttttatttataacatagctgacgtcttcaaaaagcggcgtcgcattaaattctactgataatccttctactgaaatcacttctgtctctgatttatacgattttgaactgcaaagataatgaatatttattggatacagagtagtatggcacgttatgaaaaacaaaaaaagcagccactcatcagaatgactgctttctattttaaccaatagtacttctttagaacaacttggcaggatattcaccggcatcaaccaatgcctgaatcttgtctactacactttgacggtcttccggataagtaacgccgaaccatttgctggcagtatccagcacttcaacagtagccgttccgtcattaatcaatttatctaccatcaatggaataaagaattcgctcttcaagttttccatgtttttcgggtcgctcaggaaagtcttgaagaattcctgactgtaagcgaagtaatcaggagtgaagccccagaagttcatacttaccggagtagtatcgggagttgcagtccattcgccgttatcatcgatatatttcacttcaccatccagacgttggatcttagtacgttccactactgaagtcagcagacctttatcatctgtactacaaataccacgagataccgtaccgctttcactcagcgtatttcctacgcggaaacctaccattgaataaacatttttagaatccgcaggaagtgcagaaaggaatttacccattacctggaaggaatcacgaccataaaagtcgtcacagttaattacagcgaacggttctttaatcacatcagcacccatcattactgcatggttggtaccccaaggttttgtacggtctgccggacaagtgaagccttcaggaagtgcatccaaagcttggaaaaccagttcacaaggaatgtgaccttcgtatttagaaataatcttatcacggaaatcctgttcaaagtctttgcggattacaaatacaagtttaccaaatccggcattgatagcatcatagatagaatagtccatgatcgtttcaccattaggacccagtccgtccaattgtttcaagcctccatagcggctgcccataccggctgccaataagaataaagttggtttcataaattgtgtaatattaaaaggttagtgatgtcaacggcatctgattttggtgcaaatgtacaaaaactttctttcttttgtcttatgtgatgtcctttcttttgtcttgagacaaagaaagaacgttagaacggatacccgatagcgaaatgtattcccagatttttgaagaaggcaccggtaacattataatatccgcttcgttccgtatcatagggcagatgcaaaggaataccgaagtcaagacggaacacaagaatatccatgtcgtaacggacgcctacgcctgtccccaaggctatttgtttcgggaaagttttcagacgaagttgcgaatcaggacgtgcctcgtccttgcgcagcagccagacgttacccgcatccaggaaagtagctccccaaatgctcttgaagatacggaaacgatattctacgttcgcttcgaaacggaacgtacctgtctggtcgagataagaatacttgctgtctttcgggtgatagccaccgggaccaatactacgcaccgtaaaagcacggatactgttggcaccaccaacgtagaattgttcactatatggggcaatcgtagcattaccgtatgcaaaaagagcgcctaacgctacacgggaagctattttattatttttgtctatgttccacaaatggcggaactcggtattaaatttcataaactgcgagaacggagcccccaaaagttttttcccttcctcattataaggtttgccgaaagcacgataaatagtggcagtcacatttccggcagaagtcacggtagattgccaccagataggattcttcactctccgcacagaggcattatcatatgtataagtgtactccatagccgggatgaactggttgtctaagctgacatatagtgccggattgtcggctgcaatctccataaactctttcgactggtgttgcaagacgttgaatgtcagtttgaaaggtgtgatactatgacgactggtacgcgtcggctggaaatcgtaggttgcgtttccgccgaaagataacagtttgtaatatcttgcccggttcaactgatcgatatacaaacggaaagtagtcgtagcgggaaagtcaaattcccttttcccccaacgcgggaaaaccactctagggaaagtcagagaagtagatattcccatttcccaactgttcatcaacgaacttttctctccgccaccggtctgccattcataagagcctttcagtttcacgttccaactttctccaccaccaaatacattattccgtgtaactccgaacgaagcacccggaccggtctggtcgttacttttagttactacgttcaattccagttcagcgtccaacggtttggcaaaagtagcctgcatcgtgatgtccaacgtatcacaaacagctgttgtatctttgggggcatattggatatccatataactaaatattcccaactggctgagtttctcctgtatctgttcctgccgatactggctgtaaagccgggtacggttggaagcacgcatctgtgcgttccgtacaaactgttgataattcagccaacgataaagcatattgggacgaacctgcaatttattgtaatagtggatattcaagttcttatacatcatactgtcattcggcgcttctccgttctttccgaacagatagacagacgcatcacccacgtaataaggacgctgtgccgcagccggcaatcccggcacaggaatcaggcgaaggctgatatgccctccgggtaccaaagtcgtatccgcctggtaagtcatatagtcgggacggaaataaaaatatccgaggttacgcaacaatgtactgatacgggagcgttcttcgtccaaatcaaccacgttgaactgctcacccggacttatataagacatccggcgtccgcgctccataatccgcagagtctggggagtgaaccgttgatagtaaaccgtatcaatgaaataagggttcttcatatccaccgtatagataatgcccgccttcagactgtctttcttatcaacaaccgtttcataagctaccttcccattgaaatagccataatcacgaagcaaattagtcgttaccttcacacgtacctccgggttgaccgtagaaataaatacgggaggattggccgcaaaacggttgaacatccatttaccgaatcccttcttatatttcacgaagtcattgtacatccacattttaaaagggataggaaggataccgccaaacatctttgtactaggtgtcttatcgagtgcagcatcaatttccgtcagcgccgtctctcctaccggtgttgtcgatttattcaatatgacagtcttgcttccggtgtaaagcacctccccttcgggaagatgtttcgtcaccgaacaagccgacagtaacactacacttatcagacaaacagccaatatatttatatgtatctctttcatacttacttctttttcttaaagatgaacagttcactaagtttgtctagcttcttgcgaagcacaataccgactccggtttccgtaatctcaccttcgagcacactctcgtagttcttgtcatagaacaggcggatataccgggttccggttctatccagacgatattccagagaaatattgtcgatgaaggattcggcgtcattcgtcgcattctcaccttgagaaaccttgccaccgattacaatctggaaacgattgttaaacaagcgttgtgaataacggaaactgtaatccgtacgtttacttcccgtctctgaatcgtcgtggtcttcgacaccgacagagagactcgcattcttcaagttacccatcaaggagtttatctgactactcaatacagaagtcagagcagatcccatattcagcttgccgagtccgccgccacccccaccaatcggtccggtgccgagataagttttcatcaccatgatatacaatgcctgtttacctcgttcttccgcccccatagcggtcaactcgttttgtacggtcgcatcttcgggagccgcaacatcgaatgcaaacgaaagattatccaagcggttcttgactacaacggaaacatcgaaattaaccatacgacttccaccattctctccttcggaaactgacgcacggatacggtcagtcgccttaaagttcaacatcgggtccatcggatttcccgtccattccacgtaactaccgttatcaatggcaaattcctttgctgcaatcaccggcaaagcatatttcatcaagccgccactcaacgtataacgtccggtcagagtcaggtcgccttgcggagtgtatttcatggaaaggtcacccccgccttccagttcgatacggttatcattacttgcatccaggtcaactttcactcggacggacggatcgatatgtaccatcattaccatgtccaatccgcctaaagagacagtcggcacttcctgccggacaacagttgtagtatcgctaaatgaagtaaatgttaccaaacttcccaaacggtcctgcactgtcaatggtgaatcggtcaagacatacgaaacatcggtgttccccagcagactcacgttcccacgcatattcagcccgtccaaaggccctttcaccgtcgcccggaaatcagcaaatactttgccgtaaaccagactttcacgggtacgcttagcatccagtaacgtataattttgtgccagcatattcaggttcgccattggacggctcatatcacggaaatcaacatagccatcaatagtaaacggattcttcgatgttgtgtaaatagcaaatttatcaaattccaaccgattgttctttatttgcacaggacgattatcaaacatgaaacgcgcaccatattgacgggaaaggacagcaacactatccaatacaagttcgccgtttatcaaaggttgttcagtactgcccgttatattcagattaccatccatatcaccggacaaagtgaccatctggtcaggaataaacacattcgccacccgcagcggaaaatgctccaatgttgtattcacttccaaactatctttgcctgtgcgggtaggaaccagtttcccatctgccaccagcacttctgcctgatcgtgattcagataagcattcagatattgttttccctgttcgcccggcaaccacgtagcccctaatgcaacgtcaccgatacgctgacgttcataagacagttcatcaacagacgcctcagccgagagttgcaaatccttttctgtctgtatgtaatgagcttccaacgagaacaatccggttatttcggggaagtaaggcaacacactcgttatctcttgcagacggattctacgtatttcaacatctatattctgcagagacaccgtatcgcccggtacggaatgtaccctgaatcccattccttcttcatcccacatatccacgttcgcgtatacacgcatatttttatgcaggtaaatccagttatgattctcgttgaaatgaaatctttggaaggcaacaatcggattctccggaatcagtgtgaaagcgattccgttccccttaccatgtccttcgaacagagggcgggcatttacccccagcaatacgcctgtttctcctttgccgtttttgtagtctaccagcaattccgcatcgcggtcgcgaatctctccggtcaaagtagtagcaaaagagaattgcggattcttcggtccgtttattacaccggcacgtagtttcattaaagtagtatcctgtttgacagtgaagaagattgtatccagttgcaatgtgtccatcttcaatgcatgcaccgcagcttttccattgattccccaatcgggagccgtaccgaacttcatggaaacatcatggtaggatatgtttttagtagccagaaaataagctaacggattctcttttcctgcggagaaagataaaatagctgtcggcaacgcttcacgcagttcggcgtggttcaaggctttttcatcaatctgcttcatcaggacatccatgaagtgtgtagactgacttatcaaagaattaacaccggaacgtgcactcaagttgagtttcatatcaccagatgttagatgtgtgaacaccctgttttgacgagcttcggcagaaagattaaaggcgagcgggcgcttcatcggttgaggcatcaaccccagttcgtgtaagtcgagctgagtgacgtcaaccgtcacttttccatctggataacgatgtgccagattgtattctgcatctgttgtcatcttcaacagcgcattgtcacttgtcagattagccgtcaccaatgcacctttcaaagctccagtcaaatgaacattggaaagctggtaacgtgcataatgtagttgatctaatgaaagattcagtttggctaaagcacgataagacatgacgtccagcccacggcctttggcatctgccgaaagagaaagttcgtagatagagtctttcggaaggaaattatggagttgtagattgtcaatcttcaagtcggctgcataagcctcggttgaggtattaagttctgcattcacccccatagagccttgcccctgtttcaagtgaagattagccttatattcaggtcctttcagctcgacacgggccttcagattcatgctatctgggattacgatagtaccgttgggggcttctcccgttaaagcagtcaggaagtttagattctgagtaatcatatccagaccgatagtccccgaacgcgtcaggctgtcagccaagttttcaagaataccgcctcctttcatggaaaaagctcccgggagatcgactgtgaaacgagaaatctgcatttgtttcagatttccgtccgtaccggcacgaaccacaagcggacggaagggatacgcctctttgaaactatccggcaaaccgccggcaaataacataacatcctctttaccgatataagcattgagaccggcggacaaacgtcctgtagtgggaatattgacaagttcccaatatgtctgggcggataaatctatttcggaatgaggggtttgcagttttatgccgggaatacgaataatcgagtcgttagaaaatgccctacccgtcaatgaagtgatactcaatccggaacgttcattcatcgaaaactcacggattacagcattcatatccctacctttatataataaggaatccaaaccgatacggatatcacgaacggcaatatgagacgcatcgaaaccttctccgggtttggctactccggtatcataattggcagagcttccggataacaggaattgtttcagttcataaaactgattcttcagatcagcttgtgcatcattgataaatgcttctccgatatgagcagccattcgcatcgagtcagcaggaagttgcatactgaacgacacattcttcaacttcagtttatgaagatccactttccagtttacaggagcagaagctgttgtatctttaggcgtagtcgtagtatcgttcatcaacatttgtacgtgagtgtccgataattccgtctggttgataacggccagctcattagaaagatcaactccatgactttgtaaaaagaaacgtcccagtaccccctttatcttcatgccttctattagattagccgaattgaacgctacctgacttaatgttacttcatctacctctacctttcccttgacgagcggccatgcctgtacacgcacgttcagactttccaaagacaacagcgtatccggttgctggatcacttccacgccacgaaccaacagattgagcggaaaacgaaggtcgattcgttccacctgaatctgcataccggttgctttggaagcgtatgctgtcacctcccgacgcaaaagattctgaacgggaggtatataaagtaatatcattagtattacaaaaagcaatacaggagtgagcaatatccaactcacccttcttatccattttcgtttcatgtaaaatgtgccagtgtattaaaaggtgacacaaagtaaacaattaattctgaaaaaaggttgacgttaggagcaaaatgttcaatcacaaaagaaatacaagcattatggttttctttcttcaccttctttaccggagctcttgtcactacttcaagctacttataccttacgagcttcttccagaaccttctgaatctccagaagtacacaagccgttttttcacctatctcctctgaaaaacattgcccacgttgtgtttccagccagttcaataaaggcacagcttccattgccccgattaaagtgaaaagcggaagtagtttgtgagccatagccgctattccgtccacctccttgcctgccaatgcttgttgcatccgatcggcattctttccggtttcttcgataaaggtctgaataatggaatgtgcggcatcagcatcgtcttcagaaaaggctgttaatgcagaaaagttcaaggaacttacagtctgcatatcctcagtaatgtgtgcttcgtcagcggcaagctgtccttcgttgactgtgagcaatagttctttcaccgtaaaaggtttgtgcaggcaaccggcaaaaccgtgttcttgtaaagcatctatatccatttcactgcgggcagttacggcaatcacaggaattgtctttgcctgcggaatattggaagcgcgcaagagttttaccaaatcaaagccattaatagcaggcatttgtatatcagtcagcaatacatcgaaaacagaggtacggagctgttctatcaactcctccaattgctcacaacaaacggcgtcaattccatgttgctttaacatggctgccgtcaagcttaattgaattttatcatcatcaatcaacagtacacgtatcactttcatcgggggaagcgtgacagggtcttctgccgaaattgttttttcttccaatgccctttcggacacagattttcccaccggataaagagggagaatgactgtgaagcaacttccctcccccagcttactttgcacatcaatcgtaccttcaagcaaaacaaccaacttcttcacaatagacaatcccaagccgaagccttcttctccttgtgcaccggataaacgggtaaattcctgaaaaatccgttcgcggtcttccgtagccataccttttccggtatccgaaatcgctatcgtcagcttggaagaatcatatttagccgttaatgcaatctcgcctttcggagtaaacttcactgcgttggacaaaagattattcactatctgccggagccgtaaagggtcgctgatgtatctcccatttaattcctgagcgacatggcattgcaaggttaatcctttggcggctgtcaatggttcgaagctaacatggatttcttcgaataactgcgaaggattgaaggtgacgcggttcacttccgctttattaaggtcgagccgatgaaagtcgagcaagtcgctgaccaatttcaaaagatgttccgaagaacttttcatattgtcaagatagaagcgctgccgttcgtcctccgtcagtcgggaaagtaattcggtatatcccataatagagcctaacggtgctttaaagtcgtgagtaatggcgagcatcagcttttcacgggcaataagcaggtcttccgcccgtttattagcttcttccaattgccggcggtaacgattgctgcgggatatgtcacgcactatcaaaatcaggaaaaagacagagagcagcactgctccgatagctattccaccaatggtgcgtgctgaacgcattcttacctcctgttgcatttctgcatcctggcgggcacgcaaggtcatttcctcctcgtattgttttatcaggctatccattcttgctgtcaactgcgaattcatacgctgatattttgtactagtccgccggattgtttttcgccgctgcaaccgtttttcctctgtagccatacgaatcttttgctgaagggaatctttagaagtggtcggttccagaatagtatccgtagcaacctccatggaggtattaacaagcacggcactgtcttgtttagttgggacaaacacttctgccaatctcttaaagaaacctttcttcttaggcgtagtcagtaaagaatcccgtttagtgataactcggtgttgtacccgttgctgagtaatgacagaatcttgttcggaaattatttcttcaatctccgaagcggaaagtaagctgtcattcgcttcgctcaatacccggagcatctgtatcgtattccggtctttctcgtgcagcagagtcaacaggctgtctgtccgcagattctcctggtcatcggcagccgacaatgtctccatttcgcgatgtacaaataccagagaaaaaagaagaattgcaagtaataacgtataaccgattgttactttcaactttgtggaacgataggaagccatacggtaaagttttaagtatcaagtattcacttggggagtggggagtttcgtcatgtaatgaaaacgccaccaaagcattaatcctgcacttgtcagaccgaaagggaacgccatccagacacctaccaccccccagcccattacgaagccgcagaaataacctacgggaagtgagatgataaagtaagcgataaaggcgatgagcatcatcagttttacatccgaaatgccacgcaaggcattagcaaaagtaatctgtaacccgtccccgaactgataaacgaggaaaggaaaaatgagagaagttaccatagccgccacctcaggactgtcggtaaaccaacctcctaaatagttacggcaaagaaagacaataaaagaaagcactacgcccaatgtcatcatcagatgaaaaccggcataggccgaacgacgaacgttcaaaatatcgttctgacctttgaagttgctgacacgaacagctacggcagctcccatgccataatacatcataaacgtaaactgtgaaatagccaacataacctgatgcgaagccagtgcaatggtccccaaccaacctatcattatggcactcagactaaaagaagctgtttccattcccatttgaaaagcaaccggccaaccaagtccgttcaaccgaccgaatatagcccgtgaccaccccaaacggaagaagccgactttgtaacggataaaacgagaactacgcaagaagataatgataaacacgagcaccatcataatacgtgaaaacaatgtgctgataccggctcccaacaatcccaactcgggcaaacctaactttccgtaaatcaaaagataatttcctatgatattcaatacatttcctcccaagagtatccacatggccgtcttggtatccgtgattccatccgtaaactgcttgaatccattgaaaagcataacaaacaccaatgaagccagcagcaccaaataataaggcttaatcaaaggaatcagttcttccggctggccgagattctctatattcagataaaggacagtcatacaaagcgtcaataataacgcgaccatcagattcgctaacaaactgttacgcaatgcctgtccggcaggtgcaaactgatgtgttccatatagacctcccacaacaggagttagtccgtatgaaaaaccggtactgaaaatgatagccaaattgaacacgttatttacaaaagaagctgctcccaattctaccgtactatgatgtccaatcatcagggtatcggcaaacccgagcacgatcactcctatttgtccgataacgataggtaaaccaagaaaaaataatgctttataatgctctctgtatgttctatatatatttctcatttacttttataatagagtacaactccgttctctttccgaaaagccgattgagcgacttcccgcaactgcatagcagtgacagagcgataacgttctacttctttctccaaatcttccgctttaccgagcaattcgaaccaggcaagattggtagccacattcaaataatttatattaccgaatatctgggtagactcaaacttatttttcaccttctccaattcctgtccgtcaaccaattcttgttgcaggcgatcgagttcgtcgcgcactgccgcttccgccagttcgaggctaactcccgccgaaggttttccggcaatgtgaaacaagcctgcatccacactacctgagatgtaagcatcaatgctcgagaatagctgtttttcctgtaccagatgttggttcaatcgactggaacgcccgttactcaatacatccgacagtatatcgaacacataataatccgggtgacgatgatcgcacatgtgataagccatgaacagagaatcaagaggtacatttctctctaccgtcagcctgcgttcttccgtctgttccggctcctgtggcagattccgtacaggaacttcccgacggggaacagatccgaaccatttctccgtcaattccactgcttcctcaaaagagatattcccggtcaccgccagtatcgcattgttaggagcataaaaacggaaaaagaatgctttcacctcttctaatgttgcattagcgacatgcgacaggtcttttccgatagtcggccatagataaggatgtttctgataagccaacgggcgcaaaagatgccccacatctccataaggctggttcagacagcgttgcttgaattcttccattactaccccttgctgtacttccagactccgttcgctgaaatcaaggctcaacatacggtcggactccaaccagaagccggtttccacattctgccggggcacagtgaggtagtaattggtgatatcattgttcgtccaggcattattctctccacccgctagctgaagcggcatatcataatcggggatatttaccgatccaccgaacatcaagtgttcaaacagatgtgcgaagccggtatgttcgggatgttcgtcacgagctcccacattatataatatatttagagccaccatctgtgtactttcgtcccgcgaatgtaccagccgcaacccgttgtcaagaatgtgcctattgattttcatatcatttagtcaagtatagtcgcttttattatcttccttaattccgcaacactattacaaatataactttttaagtacctgagcaacaaaaagttgctcaggaatttgccatgtcagatttttcacctatcttagtgttgcaaatcaaaatatgtatcaaacccgacagacatggcaaaggtagcaattaaatccgagaaactcactccttttggaggaatattttcaataatggagcaatttgactccagactctcatctgtaatcgactcaaccctcggtatgagatgcaggctgtatggttatcaatacagcgaaatcatccgttcgcttatgagcgtttatttttgtggcggctcatgcatcgaggatgtcaccactcatctgatgtaccacctttcgcttcatccgacacttcgcacatgcagtgccgacacgattcttagagccataaaggaactgacccaggataacatttcctacacatccgacactggcaagacctacgacttcaacacggcagacaagctgaatacactgctcctcaattgcctattgtccacagggcagctgaaagagggcgaggggtatgacgttgacttcgaccaccagttcatagaggctgagaagtttgatgcgaagcctacatacaagaagttccttggttatcgccctggcgtggcggttattggcaacttgattgtcggcattgagaacagcgacggcaacacaaatgtccgtttccaccagaaggacacgctgaagaggttctttgaaaggtttgaacaaaacaagcttattatcaaccgtttcagagctgattgcggctcgtgttctgaagagatagtggaagagattgctaaacactgcaagaccttctatatccgtgctaaccgatgcagttcgctctacaatgacatctttgccctcagaggttggaagaaagtggaattgggcggcattgagtttgagctggcctccattctcatcgagaaatggaaagggaaggcataccgtcttgtgattcaaagacagaagcggatagacggcgaactcgacctgtgggaaggagaatacacctaccgctgcatccttacaaatgactacgagtcttccgagaaagagattgtcgaattctataacctccgtggagggaaggaacgcatcttcgatgatatgaataacggattcggctggaacaggcttccaaaatcctttatgggagaaaacacggtgtttcttctgcttatggcactcatacgcaacttctataaattcatcatggcgaggcttgacgtgaagaggttcggactcaaagcaacaagccgcatcaagacgtttgtctttaagttcatctctgtgccagccaaatgggtcaggacatcaaggaagtatgtgctgaatatctattcatgcaacaatgcttatgccaatgtgttccagaatgactttggataacaccgacaacttatagtcgtgattttgcgtattgcctcaagtcgcatggtggggtaaggggcatttatatgtctttatggtgacattcgatgcactgtgccccctttttactaacgatgcagattcttttcgcttctgtatcatattaggcgcgtagttgcggatttgaggatcttcacatcttcttcgggacggtcgctacggtccgtcttcaccttctggattttatctacgacgtccataccctccactacttcgccgaatactgtatattcgccatccagatgtggagtaccacccacagtagtatatgcttctatctgctccggcgtaaaatggaattccggttcttttgccgacaattcctgtgcttccgcaaacaatttctcctgcaagtcataaagcccgttttcgtcattcgccttacgcatcttatagatttctttcatgtgtttctgcgccaagttattgaaaatgacattgatcttattttcattcatctggctttccatacccaacagtgtagaatcattgtaaaccttacccgttacgatatagaactgacaaccggaagattcttttttcggattcacattgtctccctgacgggctgcagacaacgctcctttcttatggaaatacttcggatatacaaattctgccggtacggtgtagccgacatcaccggcacccaacatcttccctttcggcgcattctttgaatccgggtcaccagcttgaatcataaaatctttgatgacacgatgaaataatgttccttcatatactccgtctttcaccagtttgataaaattatcacgatgcttgggtgtctcattatacaacttcactttgatatctccggctgttgtttcaatctttaccaatgtctctttatccatgtctcctcctttttttgttccggttttgcaggcagtaagtccgcaaaacgatatagttaataatatcaatgtaatctttttcataacgcttttatttaatttaagtttgcaaatataccactttcgcctaaatcatcttacctttgtgacttaaaagaatcaaaacctgacacaatgaaagccatattaatagtcgaagatgatataacttttggaatgatgctcaaaacctggttaggcaaaaaaggatttgaagtatcatcagtgagtaatatagcacgtgcccgaaagcatatcgaaagccagactgttgacttggtattatccgatttacgattacccgattacgaaggcattgatttgctgaaatggatgaatgaccagggactggatattcccctgattattatgaccggttatgcggatattcaatcagcggtactggccatgaaacttggtgcacgggattatatcgcaaaacctgtcaacccggaagaattattaaagaaaatatcagaagctctacaaacagagagaacgccaacagctcattccgcagccaagatgtcttcgaaaaaagtctctcccgcctcatccaaagagacaacagaaactcgtcgtgcctatctggaaggagaaagtgatgctgccaagcaactctacaattatgtaggcctagtagctcctactaatatgtccgtactcatcaacggttctagcggaacaggtaaagaatatgtggcacaccgtattcatcaacttagcaagcgtagcgacaaaccgttcattgccgtagactgcggttcgatacctaaggaattggcagcctccgaattctttggtcatgtaaaaggctcatttacgggagcattgacggataaaacgggagctttcgttgcagccaacggtggcactatctttctggatgaaatcggaaatctcagctacgaggtgcagatacaactactccgcgccctgcaagagagaaaaatacgtccggtcggttctacacaagaaatatccgtggatatccgcctggtatcggccaccaacgaaaatctggaacaaggaatcgaaaagggaacatttcgcgaagacctttatcatcgcatcaatgaatttaccctgcgaatgcctgacttgaaagaacggaaagaagatatcctgctattcgccaacttcttccttgatcaggcaaacaaggaattggacaagcatctgattggtttcgacgcaaaagcgtcacaagctttattgagttatcattggccgggaaacctgcgtcaaatgaagaatatcgtgaaaagggcaaccttactggcgcaaggcagttttattacattgctcgaattaggtactgacttactggatactactacaacttgtaccacaagcatgtcattacgtaatgaggagacggaaaaagaacatatattggaagcattacgccaaaccgggaataataaaagtaaagcagcacaactgttgaatattgaccggaagacgctatataataaactgaagctatacaacattgatttatagcattcaagtcagcctcagacaacacacaaaacaacgattgaatgaaacacatacgcaaattgaaagaaatgacatattgcaaaagcacacatttgtgtacttttgcaatataaaagtcttacgaatattatcgcgccattgcataaacattaacaccatacaaatcaatattatgaagaagtttaattttatatgcctttctatcctctattcaatttgtagttttgcgcaacagcagagtattcctgtccccaagcctcatcaactgaaatggcatgaagccgaaatgggagcagtctttcattacgacttgcatgtattcgatggtatccgctacggacaaggcaataaccgcatcacccccattgaagattataacatttttaatccaaccgaactcaatactgatcaatgggtacaagcagccaaagctgccggatgcaaatttgccgtactcacagccacccacgaaaccggattcggactttggcaaagtgatgtcaatccgtattgcctgaaagctgtcaagtggaaagacggcaaaggagatatagtccgcgattttgtaaattcctgccgtaaatacggccttcaaccgggcatttatataggtatccgttggaattctctgttgggtatccataacttcaaagctgaaggcgaaggagaatttgcccgtaaccgccaggcgtggtataaacgcttgtgcgagaacatggtaacagagctatgtacacgttatggtgatctctatatgatatggtttgacggcggagctgataatccacgcggtgacggtcctaacgtagaacctattgtgaataaatatcagcccgactgtcttttttatcacaacgttgaccgcgcagactttcgttggggtggttcggaaacaggtacagtagagtacccttgttggtctaccttcccctacccatacagccacagtaatgctaccgaacccgcacgtaaccacaacatactattaaaacacggcgataaagacggcaaatattgggtaccggctatggcagatactccattacgtggagcaaacgggcgtcacgaatggttttgggaaccggatgatgaaaataacatctacccattggatgcactaatggacaaatacgagaaatcagtaggaagaaatgcaactctcatcctcggattaacgcctgatccgaccggattgattcccataggagatacgcaacgactgaaagaaatgggagatgaaataaaccgtcgtttttcttcccccatagcgaaaactttagggcaaaaaaagagcctgactttgaatctcgggaagaagcaaactgtaaattactgcattattcaggaaaatataaaaaacggagaacgtatccgtcaatataagatagaagcaaaagttaatgggaaatggcagcctgtctgttccggagaatccgtagggcataaacgtattgagaaatttgatccgatagaagcaaccgcattaagactaaccattcccgagtctgtagcattgcctgacattatcaattttagcacatactatatcaaataaaaagtacaagaagaaatctgcaaataacacctaataactaccccatgaataaaaagaaactattcccactcgcacttgtaccactcgcagccaccagcctgcaagcacaaagcaacattcagacagggcgtacagacaaacgcccgaatatcatcctctttatggtagatgatatgggttggcaggatacttcccttcctttctggacacaaaaaacgcattacaacgaactatacgaaacgccgaacatggaacgactggcccgtcagggaatgatgttcactcaagcgtatgccagtagcatcagttctcccacccgatgcagcctcatcaccggaacgaatgcggcacgccacagggtaaccaactggacgctacaaaaaaacaccatgacagaccgtaaaaacaaacagcttgccgtccctgattggaattataacggagtaagtcaggtacccggtactaacaacacctttgtaggaacttcttttgtacaaatcctaaaagacaacggctatcatactatccattgcggaaaagcccatttcggttccatcgacactccgggagaagacccgcaccattggggatttgaggtaaacatcgccggacacgctgccggaggacttgccagttacctcggggaagagaattacggacataccaaagacggaaaaccagtttcactaatggctgtccccggacttgaaaaatactggggtacggaaacatttgttaccgaagcattaacgcaggaagctatcaaggcactaaacaaagccaaaaaatacaatcagcctttttatctgtatatggctcaatatgctatccatgttcctctgaataaagatatgcgcttctacgataaatacaagaagaaaggtatgaccgaccatgaagctgcttatgctacccttatcgaaggaatggataaaagcctcggcgacctcatgaactggctggagaaaaatgatgaagcagacaatacaattattatttttatgagtgataacggaggacttgcagccgaatcctactggcgtgacggaaagttacatacacagaatcatcctttgaatagcggcaaaggttctacctacgaaggaggtattcgtgaaccgatgattgtcagttggccgggagtggtgaagccgggtagcaaatgtgacaattacttattgatagaagatttctaccctagcatcctcgaaatggcaggaatcaagaagtataaaacagtccagccgatagacgggatcagttttattcccctattgaagcaaacgggaaatccttctaaaggacgcagtcttttctggaatatgcccaataactgggggaatgacggtcccggaatcaattttaactgtgcagttcgcaatggcgactggaagttgatttattattacggaaccggtaagaaagagttattcaatatccctaatgatataggtgaaagcaacgacttaagtgcacagcatcctgacatcgtgaaaaggctttctaaagaattgggaaactatctgcgaaaagtagatgcacagcgaccaactttcaaggctaccggacaaccttgtccctggccggatgaaaagaaatagtcgttgaaaagaaaaagaattgtggcggggagtgtggaataattccacactccccgccacagtttccacacaccccacacacaattccccactagttcagcttgtcttattattcgcaaccatttatttttcaaccacttatcacatcctttgcatttctggcacacgctttgaactttaattagacgttaatgcaaaagcaacaaccgattccttaacacaaaagagaattgaaaacatatgtctaataatcattaaagcaaacgattatgaaaaaattagtattagtagtagcaatgtttatgtttgtttgtggtggttcattccttgtaaaggctcagaactctgaaaaagctgcgacagcccagtcagaagttaatgccgcacttatcgttaatgatacagtagtcaaagacactgtaactaaaaaagacgaacctgtgaaaacagaactgagtgcaccaaccgcttttgtcaatgatacagtagtcaaagacactgcatccaaagacaaaccggctgagcctgtcaaggaataaccttaccaaaaactctcagaacaaagtctgctgaataatagtaagcacactacaaaaaagtcacccctacttcgtctattccgggggtgactttttttgtacctacatacttacttgtttggataaaatattgtacttttggaagtcaataaattatccacccaaactaactgaataaacatgaagctaagaagccttttactcattgccctcgttgcggtcgtattttgtggttgccacagttatcaaccgacctctatcaccgttgcctcctataacctcagaaacgccaacggctccgattctgccaaaggaaacggttggggacaacgttattcggtcattgccaaaatggtgcaataccacgatttcgatattttcggaacgcaggagtgtttcattcaccagctgaaggacatgaaagaagcattacccggttatgactatataggtgtaggccgcgatgatggcaaagagaagggggaacactccgctatcttctaccgcaccgacaaatttgatgtgatagagaaaggcgatttctggttgtcggagactccggacgtgccgagtaaaggctgggatgcagtcctgccccgcatttgcagttggggacacttcaaatgcaaagatacgggctttgaatttctattcttcaacctgcatatggaccatatcggcaagaaggcccgcgtggaaagtgcttatctcgtgcaagacaagatgaaggaactcggtaagggtaaagagcttccggctatcctgaccggcgacttcaacgttgaccagactcatcagtcttatgacgcttttgtcagcaaaggtgtgctttgcgactcttatgaaaagtgtgacttccgctatgcaaccaacggaacattcaatgatttcgatccggacagtttcacggaaagccgcatcgaccatgtattcgtctctcctgttttcaaagtaaaaagatatggtgtgctgacagacacgtatcgcagtatcagaggaaacggaggcaagaaggacgcaacggactgtccggaagaaatcgacatcaaagcttatcaagcccgcacgccctcggaccatttccctgtaaaagtagaactggtgtttgagggagaagaacaaaaataactcgaaaagctttacctgtactaggtctacccgacaaaacacactgttgggagagttaattctgagacttatcaatgaaggaaaggttgacttattgaacagcatccaatcgtttccactcccgctcttacccatgaaataactgtttcatacggcaaaaccaatagtttcatgcattggaacctttggtttcgccgtacagaaaccatagtttcaccggtgggaaactttagtttcatcatggagaaactttagtttcagacgcttgaaacttttgttcccaaggcttgaaacttccagtttcatacagcgaaactactcttttctctatgaacagtgaaagcaacagttaccgtcacactattgtcacgccttgctatcacagcagaactcacatattatcaactatttatatcttaccatgtgacagatgacagtattttttttaattcatttgtagagagataaatccgatgttggtatcagacaccgaacgctccgccccgactatacagcctccaccgagaggatacatttccaacgcaaaaaaaaaggatttgtactgattaaaacagttcaaatcctttccataaatttccctcgggaaggggagctttcagttctatcagctccttcgagacagggtgtacgaaccgtaccctcctggcgtgcagacaaatacttccatccggattggaacgcggagaaccgtatttcaaatctcctttgataggacatcccatttttgccagttggcaacgaatctgatgatgccgtccggtttttaagtcaacttcgagtaaataatagttctccgaacgaccgatcaaacggtagtccaaaaccgctttcttactattcggcacttccttgtcgtatgcatagctcttgttctgcttttcattgcgcacaagaaaatgcaccaattcgccttctgattctttcggagcattcttcacaactgcccaataagtctttttcacctcaccggcgcggaacatctcattgagccgcgtaagcgccttactcgttttggcaaaaataacaagaccgcttacggggcggtccagccggtgtgtcacaccgaggaaaacattgccgggtttctgatatttctctttcaggtactgcttcacagtctccgaaagaggcgtatcacccgtcttgtctgcctggacaatctcggaagcggtcttgttgactacaatgatatggttgtcttcgtatacaacagtcattctgttcgattacatgttcataccaccatctacctgaatcacctgtcctgatacgtaagaagacatatcggaagccaggaaggtagcgatgtttgccacatcttcaggagtaccaccacgacgcaaaggaattttctttgcccattctgctcttacttcgtcagaaagagcggcagtcatgtctgtcaggatgaatcccggagcgatagcattggcacggatgccacgagaaccgagttcttgtgcgatagacttggccaatgcaatcatacctgccttggaagcagcatagttagcctgtcctgcattaccgtgaacacctacgacagatgccatgttgataatgctaccggctttctgacgcatcatgacaggtgtacaagcgtggatgaagttaaatgcagatttcaggttcacgttgattaccatatcccactgctgttcgctcatacgcatcatcaaaccgtcgcgagtgataccggcattgtttaccaatatatcgatacgtccgaagtctttgtggatttcttctacgacctttgcagtatcttcaaagttagctgcgttagaagcataacctttggcttttacacccattgcttcaagttcttttgttgtattttctgcattttcgtcaatgacaaggtcagtaaatgcgatgtttgcaccttcggcagcaaacttcagagcgatagccttaccaataccgcgggcagcaccggttacaatggctgtttttccgtctaataatcccatactaaaagttatttaattaaatttctgttctatgcagtgcgccaaacacaatgttggctacgtacttatttctcgtatcttcatccagatgtgcacctatatgaccacggatgtaaggaacttcaatccctttcacacaataatgaatcaagtcagccgtcatctccacatcgtcaatgtgaaaaactccctttgcctgtccttccaaaagaacggccttaaagagttgtacctccttcgcatcaaatttcttacggactttctccacccgccagatatcacggaagaaataagcacgtaaggttccgtttcgatagactacttcttttactgcatccaaccgggtatatatcatctccaacagtttttcgtccggcgagatattcttctcagctacccgcttcatcatatccgacaggatatctaattccgattctacaacagccagatagatttcatccttacttttaaaataggtataaagcgttcgtctaccttttttagaagcaagagcgatatcattcatcgtagtgttctctacccccatctttgcgaaaagctgacgggcaacatctactaacttggcttttgttttggatacggtcataggttacaaattgcacattgctgaatattttgagcaaaagtaactcttttctttagaccatacaagaaaacagacagaatattaacatttgtatattaataggtactaaaaaaactatcatcattatcctgctcattttcagcaaaataagaaataaatgatgatttattcgaaaaatattcagcaatttatttgtttgtctcaaaaaaagccgtacctttgcacccgttaaacatcgcggagtggagcagttggtagctcgttgggctcataacccaaaggtcattcgttcgagtcggatctccgcaactaaaaaaagaagaatcgtagaaatgcgattcttcttttttatgtaggctctttcaatagtagttcaattcacaagttcctttcagttaccaacaagaataccaacaaagttattaacaggttaattatctaaaaataaaataattgctcctaaacgaggaccgtttataaacaaggcaagattcacttattcacaactatatatttcgttgatatactataaattcactcttctctcccaaacgaacgatactccaacgaagtaagccctgtacgcttcttgaaaaaagaaaagaagtattcggtagactggaaaccaagaaaaaaagaatctccttgacggattgggaagtaccgaccagtagttgtttggctttacgaagtttcagttcttgaaagtatttggcgggagcatatcctgtatattctttgaaaacacggcggaaccatgaatagctaatattcaacctcatcgccaactcctccggatccacattgccggctacattttcattcattataatcttggcctgttcaatcttctgaccgacatcactcatttcaaaaatcttgttttttggagacagaatgttctttcaacggataaggagagtcgggaggaatagactgataaccgagcgtattaacccacaaaccgaatttccggtccatgtcatttacaatcaagtatttaaattccactcctaagccattgtcctcagccatatcaatgtgttctcatacaatttgggttagacaaaaataagaattatcttcagaaatcgtatgctaagaaacaaaaaacacccggagtgtctttttggatacatccggatgtttctcacaaacaaatcttatttaaacattaaaatgctttgcgatataatacttcaatgtcttcaactgatgtaggacgagggttaccacccgtacaaacatcattaaaggcagctaccgccaatgcagggatatcttcttctttcacattgatctcatgcaatttttgcgggataccgatactgagagaaagagattttaccgcttcaatagccgcttttacaccttccgcctcactcataccggcagtttcgactcccatagctttcgctatattgatatatttcggagcagccggagattcggcattatattccattacataaggcaacaataaagcatttgccaccccatgaggagtatcatagaaagcacccaacgggtgagccattgagtgaacgattcccaaacctacatttgagaatcccataccagcaatatattgtgcttgagacatcgcttcacgggcaactacatctttgccattatccacagccgctttcagattctgcgcaatcatttcaatggctttcagttcaaacatatcgctcatcgcccaagctcccggagtgatgtaactttcgatagcatgcgtcaaagcgtccatacccgtagcagcagtcagccctttcggcatagaatacatcaattccgggtccacaatagccactgccggaatgtcattcgggtctacgcaaaccattttcttacgggcatcttcgtcgataatcacgtaattgatagtcacttcggcagcagttcctgcggtagtaggcaatgcgaaggtcggcacagccttatgtttggtatcggccaccccttccaaagatttcacatctgcgaaatccggattgttcactacaataccaataccttttgccgtatcaatagaagaaccaccacccaatgccacgataaaatcagcaccggaagctttatatgcagccacaccattctgtacattggcaatagtaggattggcttttacatcactgtaaagttcataaggaatcttattgtcgtcgaatactttgatgatttcggcagctacaccgaacttgataaggtctttatctgtaacaaaaaaggctttcttaaagccacgtctagctgcttccacagcaattacactccggcaacctgcgccgaaataagaagtctcatttaaaataatgcgattcatggttgtgttattttgtttaaagggttaaccgcaacatctcctattgtaggaaatattgcggttgctaaagtagataaattcaatgattaatacaaatattatttaggaagattgaaggcaacagtcatttccttcatctgttcccggctcatgccatccggttcgaagcccatattcttggctgcaatataaattaatgcggatttatttaatacgtcaatttggtcgaaagcctgcatcgcatcgcagtcaacagcaaatactccatgcttttcccacatcaccacatcatagtcctgcaattccttaatcgtagcttctgccagttctaccgaactaggcaacttataaggaatgattcccaaacctctcgggcagaatgcctttgtctccggaatcatactccacaacaaattggtagccacatccttttgaaggaatttttcacaatgcgtcattgcaatcaattcgatagggtgagtatgtacggaagccttataaggagaattcttactcaacaagtcattatgcacgctcaaatgagaaggcagctctgatgtcgggacaaccgcctcatcagctataataacataactggcacaatcatccaaaatccggattaccgaaccattctccatcggccagcgagctaaatcacgcatacgtttgttggttcctttacagtaaaaataacagcctttgagataaggcagtgtgacaccgattgacctgacttcactaatcggctgcatccgacgaatttcatcgtctacaaattctgtgatattaatggtgatattaccgccattacgttcagcccatcctttctgccacaagtatccggcaacttctgctaccttgtctacttccttggcaagtgctgagcgattttctaaaattgatttcatatatatctattatttaaaacaaattcgggaataccagcgagaaaatcaacaccagcagtccacaaaccagcacagtgattgttttcgcagatactcccttccattctttcaggataatcccccagacattactgaaggtcacattcaatgccattaggatacaccaggaaaaagccagtaatacggggctttcggcaagaaagctctttcccatttccagtccgaagaactgcatataccacagcacaccggccaacgcacagaatactaaattgttactccacactttccctttagcatagtcattcatggatttattagtcacattctgttgcaaacaataaattgcatttgtcaggaaccctccgaatgtaaccagaaagataacaggaagccctgcataaagtccttcaactcctcccgctaatgcagcctccttgataggcgtcccggcatccagtcccaaagcgaaacaggcactcatcacacctgccagcaacgctaccaacaatcccttcgtcaaagcaaagtctttcacagcagcgcgcttttcttcttcactcatattctgcgcacgcaaactaccagcatagccaataatcgcaataccggctaacgtaatacaaacacctagcagaagaaccagtccgttaccttcgaacaaatttgttcccgcaaaaagagccggaaggagcgttccgaaaccggcacaagttcccaacgagatgctctgtcccaatgcaacacccagataacgcatggaaagcccgaaagtcaatcctcctactccccacaatatgccatacaagatgctcattccggcacctccagctccccacagttcaaacaaactgcctccttcggacacccccagcaatgatcccaggaacggaaacactaaccaggcaaatacaccttgtatcaaccaaaaactttcccaactccactcttttacctttttaataggtacataagaactagactggcaaaagctaccaatggctataatcagcaagccgatcagaatatccataacttatcgtttagaagttacttcagcttcgtacttttcgatctccgcaatgaaatcttcgcctaccggaacattatttttcaagcagaacatatcccataccgcattccaaggaagcgctttttcttcttcaagcaaagccaaacgctgaaatccttgtccgttagcttcgtattcacgcaatttggcaatcggttcaagcaaagcacgagtcatacatttctgtgcagcacggctaccgattacataagcaccgatacgattgatagatgcatcgaaataatcaaggccatagtgtacacgatctagtgcaccacaacgaacgatttcactgaacagttccatagtaggatcatccatgatagtgacgtggtcggaatcccaacgtaccggacggcttacgtgcagcatcagttcaggaacataaagtaacaatgaagatactttgtcagccacactttctgtcggatgaaagtgacctgtatccaatgtaatcatcttattgtgtgaagcaccatagccgatgtagaagtcattagaacctaccgtataactttccaaaccgataccaaacaccttagattcgatacagtctttcatattcttatatccagtagcgaaaatctggtccagagaatctttcaacagtgcacggtatttcatacgattgactgtaatatccttgcttccgtcgtgtacccaaagattcatgatgcaaggatcaccttgcgctttacccatttcttcggccactgcacgacaacgtttcgtatgttcaatccagaactggcggataccttcatccgggttagaaagcgacaaatcaccggatttcggatgtgagaaagaagtagaattaaagtccagtttcatattatgttctttcccccactctatccagcttttgaaatgttcgggttccacctgatcgcggtctaccaccttcctctgaaaatctccgtaaatctcatgcaggttcagccgatgagtacccgggatataagaagcggctttcaagatatcggcacgcagttcgtcaatattgcgggctttacccggatagttaccggtagcctggataccaccagtcaacgaaccggcctgtacttcaaatcctgctacgtcgtcagcctgccaacaatgaagtgacagatgaaaatcctgcatggttttcaatacttgttcggtgtctacccctaccgctgcataacgttccacagcaatctcatacgctttctgaatcagttcttcttttttcatgatattctattgtttaaaatgatattccaccggttatttattaattatcgaatgcagtttttaaagtggatataagccgtatcccaagcatccgtatcttgtggatgataagtttttaaaggaacaaaccgctggattagccgacgcatacctgccatatccgttgcttcccccgccgccattgcctgaatcatcacattaccgatagcagtggcttcggacggtcccgcaactaccggaataccgatagcattggcagtaaactggttcagtaaatcgttacggctgccaccgccaatcacatgcaatgtttcaatcggacgaggagaaagagaacgcaagttctccaacacctgacgataacgcaaggccagactctcaaagatacaacgcactacttgtccacgttgttcgggaacaggctgtccggtggcatggcaataggcagcaatcgatttttccatattcgcagggtttacaaagcaatcatcatccggattaatcaggctgcggaacggttcgcaagcatctgcctcgctgattaactcaggataacttgtatctccccaattcaaacggcaacgttccaatagccacattccgcaaatattcttcagcagacgaattgttccttccacaccaccttcattcgtaaaattcaaggtttctgtttcggtattaatcaccggagcgtccgtttcaactcccatcaacgaccaagtaccgctactcaaataagcaaaattacggtctaacgctggaacagcggcaacagcagcccccgtatcatgtccggccacagcaatcacaggcacagctcccaatccggttattttctgcacttcttctgtcaatactcctaccttttcacccgggaatacaaaacgaccgaagttcttctctgtcaatccaaccactttcagtaactctggttcgagacttcgagtttgtgcattcaccaattgagcagtcgaagcaatcgtatattccgtcaccattttcccggtcagcatataacttaatgcatccgacataaacaatatcttatccgctgcctccaatgcgctatcattattacggcgtaaagtatctaactgaaaaagtgaattaaaattcattatctgaatacccgtcttttcatataccttgctacgggagatgcgggaaaagagagcgtccggagctcctaccgtatgagggtcacgatatgcataaggctgacgaagtaagtttccgtcttttccgacacaaacaaaatccactccccacgtatcaataccgatagaagcaatagactcgccacggtgagccaccaattttaatccttcaatgacatgacgatataatgcataaatatcccaatagaaatgcccgcccacttcaatcaagtgattaggaaaacgattgatttcttccagattcaatccaccttcaataaaagtacccaagatagtacggccgctcgttgcgcccaagtcgactgcaaaaaagttttgtttcatggtattctgtctatatatttaaagtatccatttacctacatggcaaagatagacgattcctttctcatgctccttacacattttgattgaaaggatatacattttgacacaaatacataaaccaaacttccactgtttagcatatttttcacttttatgcaaaaaaagtattgttttatgcatattttctccagaataatgcatacttttgcgccattcttagaataattatacaatgaagaagaaagcaaatcggttagacgccatcaaaatgattatctcaagcaaagaggtcggttcgcaggaagaactgctgcaagagttgaaccgcgaaggcttcgaactgacacaggccaccctctcccgcgacttgaaacaactgaaagtagccaaagctgccagtatgaacgggaagtacgtatacgtgctgccgaacaacattatgtataaacgctccaccgatcagagtgccggcgaaatgttgcgaagtaacggattcatttccttgcaattttcaggcaacatcgccgttatccgcacccgcccaggttacgccagcagtatggcttacgatatcgacaacaatgaattcagcgaaatactgggaaccattgccggcgatgatactatcatgttggtgttgcgtgaaggagttgcgacaagcaagattcgccagcttttgtcactcatcattccgaacattgaataactatacatatttatatatataaagaaatggacactcaacaaatagatgttatggtagccgacgcctcacatgaggtatacgttgacactattttggaaactatcagaaatgctgccgccgtgcgaggaacgggaatcgcagaacgcacacacgaatacgtagcgacaaagatgaaagaaggtaaagcaatcattgctctctgtggtgacacattcgccggattcacctatatcgaatcatggggaaacaagcaatacgtggctacctccggtctgatcgtacatcccgatttccgtggtttggggctggcaaaacgcatcaaacaggcttccttccaactggcacgcctccgttggccgaaagctaagattttcagcttgacctccggagcagctgttatgaaaatgaacaccgaactgggatacgtccctgtcaccttcaacgaactgacagacgacgaatctttctggaaaggatgcgaaggatgtatcaaccatgacatcctgaaagctaaaaaccgtaagttctgcatctgcacagctatgctgtacgacccgacagatccacggaacattaaaaaagaacaagaaagaaataacatttaaaagatacagcactatggaagaaaagaagaaaaaagtagtggtggcattcagcggcggactggacacatcgttcaccgtcatgtacctcgctaaagaaaaaggttatgaagtatatgcagcttgtgccaatacgggtggtttcagcgaagaacaactgaaaacaaacgaagaaaatgcctataaactgggagcggtaaaatacgtaacgctggacgttactcaggaatactacgaaaagagtctgaaatacatggttttcggaaatgtgctgcgtaacggtacttatcctatttcggtcagctccgaacgtatcttccaggcattggctatcgcacgttatgccaacgaaatcggtgcggatgccattgcccacggttctaccggagcaggtaatgaccagattcgtttcgacatgactttcctcgtactggcgccgaacgtagaaatcatcacactgacccgtgatatggcattgagtcgtcaggaagaaattgactacttgaacaaacatggtttcaacgcggacttcaccaaactgaaatattcatataacgtaggtctgtggggtacctctatttgtggtggtgaaatcctcgactccgcacaagggctgcccgaaacagcttacctgaaacacgtagaaaaggaaggcagcgaacaactccgcctgactttcgaaaaaggagaactgaaagctgtcaacgatgagaaattcgatgacccgatcaaagcaatccagaaggtagaagagatcggcgccgcttacggtatcggccgtgacatgcatgtgggcgacacaattatcggtatcaaaggccgcgtaggtttcgaagccgccgccccgatgctgattatcggtgctcaccgtttccttgagaaatacacattgagcaaatggcagcagtactggaaagaccaggtagccaactggtacggtatgttcctccacgaaagccaatatctggaaccggttatgcgtgatatcgaagcgatgttgcaggaaagccagcgcaacgtaaacggtacagcgattctcgagctccgcccgctttctttctctaccgtaggtgtagaatcggaagacgacctcgtgaaaacgaaattcggagaatatggtgaaatgcaaaaaggttggactgccgaggatgcaaaaggctttatcaaggtaacttccactccgttacgtgtttactataacaaccataaagacgaagagatatgattaaagcaggaatcattggtggcgcaggatatacggcaggcgaactaatccgcctgttactcaaccatccggaaactgaaatcgtatttatcaacagcagcagtaatgccggaaacagaattactgacgtacacgaaggcttgtatggagaaacagatctaagattcaccgaccagttacctctggacgaaattgatgttcttttcttctgcacagctcacggtgacacgaagaaattcatggaaagccataacataccggaagacctgaaaatcattgacctttccatggactaccgtatcaagagtgacgaccatgactttatctacggtctgccggaactgaaccgacgagctacctgtacggcaaagcacgtggccaatcccggttgtttcgccacctgtatccaactcggcctgctcccgctagccaaaaacctgatgttgacagacgatatttcggtaaacgccattaccggaagtacgggtgccggcgtgaaaccgggagctaccagtcatttcagttggagaaacaataacatcagtgtgtacaaggcattcgagcatcaacacgttccggaaatcaagcagtcactgcaacaattacagaacagctttgactccgacattgactttatcccgtatcgtggcgatttccctcgcggcattttcgctacccttgtggtaaagaccaaagtagccctcgaagaaatcgtccgtatgtacgaagaatattacgccaaagactcatttgtacatattgtagataagaatatagacctcaaacaggtagtcaacaccaacaaatgcctgatacatcttgagaaacatggcgacaagctattgattatctcctgtatcgacaacttgctgaaaggtgccagtggacaagcggttcataacatgaacctgatgtttaacctggaagaaaccgtaggactacgtttgaagccttcagctttttaaaaacaaaagaattatgaaattattcgacgtatacccattatacaacatcaacatagtcaaagggaaaggctgtaaagtctgggatgaaaacggaaccgaatacttagacctttacggaggtcatgccgtaatctctatcggacacgcacatcctcactatgtggagatgattagcaatcaggtagctaacctcggtttctattcaaactcagtaatcaacaaactccagcaacaggtggccgaacgactgggaaagatttccggttacgaggattacagcctgttcctgataaacagcggagccgaggcgaatgagaacgctctgaaactggcttctttccacaacggacgtaccaaagtggtatctttcagcaaagccttccacggacgtacttcactggcagtagaagcaaccaacaatccgtctatcattgcacctatcaacaacaacggtcatgttgtttatcttcctctgaacgacgtcgaagccatgaagcaggaactgtctcggggagatatatgtgccgttatcattgaaggaatacaaggtgtaggagggatcaagataccgactaccgaatttatgcagaaactccgcaaagcttgcacagaaaccggcactatcctgattctggacgaaattcagagcggatacggacgtagcggtaaattcttcgcccaccagtatgctgatatcaagccggacatcatcaccgtagccaaaggaatcggtaacggcttcccaatggcaggcgtattgattagcccgatgtttaaaccggtatacggacaattaggaacgacttttggaggaaaccacctggcatgttcggcagcccttgccgttatggacgtgattgaacaggaaaatctggtagagaatgcagccaaggtaggtaactacttgctggaagaactgaagaaattcccgcaaattaaggaagtacgcggacgcggactcatgataggactcgaatttgaagaaccgatcaaagaattgcgcagccgcctcatctatgacgaacatgtgtttaccggagcaagcggtacgaatgtactccgcctgttaccccctctctgtctcagcatggaggaagccgacgaattccttgcccggttcaagaaagtactctaattgctcattctgattaataaacagccaacaataaaagcagcctttacaagaaaacgatttcttattcaggctgctttttgttttttcgtaattaaccgttacctttgcctgtgacaactcattaaaaacaagcgtatatgaaaatagccattatcggtgcaggaaatatgggcggttcaatcgcccgtggcctggcaaaaggaagcctgatagcagattcggacatcatcgtatccaatcccagtgccgggaaactagagagactgaaaaaggaatttccgagtatctctaccacaaacaataacgcagaagccgccacaggagcagacattgtcattctagccgtcaaaccgtggctgatgcaaccggtcatgcgcgagttgaaactaaaaagcaaacagatacttatctcggtagccgccggtatcagctttgaagaactggctcattacgtcatcgcaccggaaatggcaatgttccgtctgattccgaacacggccatcagcgaactggaaagcatgacactggtcgccgcacgtaatacgaatgacgaacaggaccaatttatcctccgcctattcagcgaaatgggaacagtcatgctgattcccgaagataaaataacagcagccaccgcattggcttcctgcggcattgcctacgtattgaaatatatccaggcagctatgcaagccggcatcgaaatgggactccgccccaaaaacgccatgcaaatgatagcgcaatccctgaaaggagctgctgcattgattcaaaacaacgacactcaccccagcgtagaaatcgacaaagtgactacaccgggcggaatcacaatcaaagggatcaacgaactggagcacaacggctttacttccgccattatcaaagcgatgaaagcctccaaataacgccacaaaattattaatcataaaataccaaccacttgtatgaatgaccaaattaaacaaatagcagaacgcctccgcggactacgcgacgtactcgaactgacttctgaggatatcgcccgcgacagtgacatttctgctgaagagtaccgactcgcagaaactggagaatacgatatttctgtcagtatgttgcagaaaatagcccgtacctacaatgtcgccctcgatgccctgatgttcggcgaagaacccaaaatgagcagctactttgtaacccgcgccggcaaggggaccagtatcgaacgtacgaaagcctacaaataccagtctctggcagccggattcatgaaccgtaccgccgacccgttcatcgtcaccgttgaaccgaaaggagatgacgagccgatccattacaacaagcataacggtcaggagttcaacctcgtactcgaaggacgtatgcttatcaacatcgaaggcaaggaaatcatcctcaaccaaggcgacagcatttattttaactccaaacttccacatggcatgaaagcgctcgacggcaaaacggtacgttttctggcagtaattatgtaataacatcatggtagaaagatttttatcacagacctcctttacctcacaagaggatttcatcaagaacctgaaaataaacgtcccggaaaacttcaacttcggttatgacgtagtagatgcctgggctgccgaacagcccgacaagaacgctttactgtggacaaatgacaaaggtgaaagccgtcagttctcatttgccgacatgaaacgttacacagacatgacggcttcctatttccaaagtctgggcatcggccgtggcgacatggttatgctgatcctgaaacgccgctacgagttctggtatagcacaatcgcccttcacaaactgggagcaaccgtcattccggccactcatctgctgactaaaaaagatatcatctatcgttgcaacgctgctgacatcaagatgatcgtagctgccggcgaaggaatcatcctgcaacatatcaaggacgccctgcccgagtgccctaccgtagaaaagctggtcagcgtcggtcccgagattccggaaggattcgaagacttccacgcagggattgagagcgccgccccgtttgtacggccccgccatgcaaacaccaacgatgatatctcattaatgtatttcacttccggcaccaccggcgaacctaaaatggtggcacatgactttacctatccgctgggccatatcgttaccggcagcttctggcataatctgaacgaaaacagccttcaccttactatcgccgatacaggctggggcaaggccgtgtggggaaagctctacggacaatggattgccggagcaaacatctttgtctatgaccacgagaagttcactccgggagacattctggaaaagatacagaattatcatgtaacttccctctgtgcacctcccactatcttccgcttcctgattcacgaagacctgacgaagttcgatctgtcttcactcaaatactgcaccattgccggagaagcattgaatcccgctgtattcgatacattcaagaagttgacaggcatcaaactcatggaaggtttcggtcagaccgaaaccactcttaccattgccactatgccttggatgcaaccgaaaccgggtagcatgggattgcccaatccccaatatgatgtggacttgattgaccatgaaggccgttccgtagaagccggagagcagggacaaatcgtaatccgtaccagtaaaggtaagccgctcggtcttttcaaagagtattaccgggatgcggaacgtacccatgaagcttggcacgacggtatttactataccggagacgttgcctggaaagatgaagacggttatctctggtttgtaggtcgtgccgacgacgttatcaagagttccggctaccgcatcggcccgttcgaagtggaaagtgccttgatgacacatcccgcagttgtagaatgtgccattaccggagtgcccgacgagattcgcggacaagtggtgaaagcaacgattgtattgtctaaagaatataagaaccgcgcgggagaagaactaatcaaagaattgcagaatcacgtaaagaaagtgactgcgccctataaatatccgcgtgtaatcgagttcgtagaagaacttccgaaaacaatcagcggtaagattcgtcgtgtagaaatccgcgagaacgatcagaagtaaataaaaaacgaccatttcatcgataaaatcctcctttagctgctgcccaacagcctaaaggaggatttcttttcatgcacaatgctacaaattggtcaacttatgcaaattctggttcaatgaatcatttgtatactatatctgaatcaaaattacacgtctaagtcgtttttgtctcttatctttgccacagtaaaaataaaaacacactataaagattatgattacaagtagaaagatttctcaagtcaatgtttttgctggtagtccttgggaagtagccagcgtaaagaatctgctgaaagcagcatatattgaggtttcaatgaaagagaatgggcggaacggtttcctcttatctgtcccttgcgaatattatacggcagcaatgcgtgtgattggcaatagaaagatttcataggttttaggttaatatattcaggattgagtgccgattgtaatgggggttgtaatcggcttgttttattatcagcctactgctttaccacccactctcccctatgtcctttccgttcagctatacttgcctttcggcttaggcccccattaaacatccgtcatacagtaggtattcatctgttatccggtaatgattgttcgcaaaagccaccgttataattaactcgccacagccgtggagagtattcgccacggccgtggaaggatctctccacagctgtgagaagaactcgtcacagccgtggcgaattagtaataccggtatcctgacagaataataccggtgtctcaacacaactataccggcttcccttcttataaagtcttacttagcctgcccgtaaacaagcaacttcagtctttattgtgttcaagctatgtaacaacttacaccacaaacaatccatgcatgatgccctgctacccgtagcgaacacttataatcgcaagaaatcaagataagaaacaatgacgattacacaaatcaggaagaaggaagatacggtactgtatctgaaccgagcagtgtacttctgtcccattttagaaataaataaggcacgaggcaaaaaataccaataaactgataaagaaaaaaataattgtgaccggccatattacaagatttccatatctttgcccactataatttattacaacgtattaaatcaataataacatgaaattcaattaccacattatcatccttttgcttttaattgtccgattgttcacaccaagtacggcaaaggctagccaaaactacatcaacaacctatatccctccgacaatgatgaatttgaaactttaatggagaaaataaggaaagactttgcacagaatccgcttattgacgagtttctacacaaatacgataccgccaaaggctgtttcaccgacgtggactacagccgccgcgaccgtacaaactgggaacctctcactcacatagaccgactgtatgattttgcatttgcctacaccaaccctcagaatacttactatcagaacgaagatatctataataagatagtgaaagggctggaatattggtatgaacgcaatccgaactgcaacaactggtggtacaaccagattgccgaaccgcagaaaatcggtatactgcttatacagatgcgtgtcgggaaaaaacagataccggcagaattggaaactaaaaccttgcaacgtatccgcaaagaaggaggagatcccgccaaatggaccggtgctaacagaaccgacatcgcacttcactggatttaccggtcatgtctggaaaaaaacgaggccgacctggaaacggctctcgcaaatgcttacagtccgatagaatatactgtaaaagaaggtttccagcacgacaactcttatttccaacatggcgtacaactttatatcggtggatatggcgatgagatcctgaaaggaacaactcaggtggctatgtatacccaaggaacaaaatatgccttgagcaccgagaagatacagctgttaagcaagttcatgcgccaaacttattatcaggccatacgcggaaaatatatgcttttcgatgtactgggcagaggcataagccggaaagatattaccgacaaaagcgccaccgccctatttgccgaacgtatggcggttctcgatccggaacatattgaagagtacaaagctatcatcgcacgtctaaaagatgaacaggctgccgactacaaactaaagcctctgcatacacattatttccgaggagactataccctgcacgtacgccccggctatacgttcgacgtccgtactgtatccacccgcaccatgcgttgtgaatacggcaacggagaaaacctcaaaacttatttcatgtcggacggatgtaccaatatcgtaactcaaggaaatgaatatgccaatatcttcccagcatggaactggcgcagaatccccggaacaacggctccgcaactggacacgatcccaatggccgcaagcgactggcagactcggggaacttccacttttgccggaggggtgtccgacagtatctacggagtgtccgcctatgcttacatggacaattatgccggtgtgaataccggagccaaaaaagcctggttctttttcgacaatgaagtggtgtgtttaggatcaggaatcaattctacttcatacgcacctgtatacaccacaatcaaccagtgtttgcttgatgacaagaacatattattatcacagaacaagcagcaaacgacaataaagaaaggagaattttcctacgattctcccgattgggtattacataacggaatcggatatatcttccctcaaggcggcaggatattcttatgcaatcagcaacaaacgggctcatggtatgacatcaaccatacagaatcgaaagaaatgcaacaacgggaggttttcacactcggattcaatcatggaactaaccctcgtaacgctacttatgcatacatcatagcaccgggaataacttctgcccgacagatgaatgcatacaataaaaagaatgggattgaaatcctggcaaatacggatgccatgcagatcgtaagaaacaagaagctgaatatctggcaaatggtattttaccgggaaggaactttcactcacaaagatattactgtaaaagtagataaggcatgcgcattaatgctcaaagatatctatcaaagtagtgcagaactgcacattgctgatcctgcacagagtcagtcgtgcatcaaagtggatgtatacatccccaaagtttccaaaaacacccgtagtatcttatgtgattttgaaaagacaggcatctacgccggtgcatccaagaaatactctctttaatataatacgagttgagtgctaaaaccggaagatattcaggcccgtcagataatacattaaccgtggctttcatatacacttccggtttacctcccggtttacataaagctcataaatcaaactcaaatccggttttagtcagtatcaaagacaaaataacaccataactgatacataaacaaaaagctccgtaaatcaaagatttacagagcttttaatcaggaatactcgtactcgaagcgggacttgaacccgcacagccgcaatggccaaaggattttaagtccttcgtgtctaccattccaccattcgagcatcctttcaaagaaagagcggaaaacgagactcgaactcgcgaccctaaccttggcaaggttatgctctaccaactgagctatttccgcgtattttcaacgggtgcaaagataaacagtttacttgtttctgccaaatcttttcgaaggaaagtttaaaaaactatccttcgaaatgctgtttatcgcccaagaagtgccttttctgcttcttccatcccacagaaattgaaaccttcaacggtctgctgcatcaatgcggagatttcggcattacataaattaccaatactgccttcgtgcgtatgatgtacttctttaccatgagagaattttccggcctcaatatccagtcccacctttttataagcatcacggaaaggcataccttcacgagccaaacgattcacttcttctacactgaagataagcagatacttatcatcgtcaagaatatgttcgttcacttttatctcgttcattatataggtcgtcatctgcaagcaatctttcaattcctggaaagcaggaataaagacttcttttataatctgcaagtcacggaaatagccggatggcagattattcgcaatcatcatgatctgttgaggaagcgattgcaatttattacatttggcacgtgtcaattcaaagacatccgggttcttcttgtgtggcataatactagaccccgtagtacaatcatccggcaactttacaaaaccgaagttctgactgttgaacatacaagcatcaaaagctagtttggatattgttccggcaatggttgccaaagcaaaagccacattacgctccatttttccacgtcccatttgagcatatactacattgtagttcagcgaatcaaaaccgagcaaacgagttgtcatcgtccgatccaatggaaaagaagaaccatatccggcagcagagcccagcggattacgattgcacatcttaaaggcagcctgcaagaataacatatcatctaccaagctctcggcatatgcaccgaaccacagtccgaaagaggacggcatagcaatctgtaaatgtgtatatcccggcatcagtatatccttatatcgctcactctgattaaccagcacatggaaaagttgctctaccgcctcagcgatttctttaatttgtgtacgggtaaagagcttcaaatccagcaacacttggtcattgcgtgaacgcccgctatgtatcttctttcctatgtcacccaaacgccgggtcaacatcagttccacctgtgaatgtacgtcttccactccttcttctatcacaaattcacctttttcggccgaagcatatatattcctcaactctgccaacaattgcacgagttcctcctttgtcaacaaaccgatactttcgagcattgtgatatgagccatagaaccgagcacatcatgtttagccagataaaggtccatttcgcggtcacgacctacagtgaaacgttcgatatctttattcacctgtacggatttctcccaaagtttctgtgccataaaaacaagtattagtaattaataacagccagcatttcaaccattttctccaacccctcctgaagcggtttctgtaccatcgctttcataaacggattaatatctatttcgatagtcactttcacattacattcctcctcagcagtttcaaccagttgaatccacatattaaaaggaagcggtgaattggtagttgccagtttaatggatttacaaggatcacgttctacaatttgcagcgtcaactgccctacgggagagactgtaaaactcaacgtatccgaatcaaaacttaaatcttccactttatcctgtggcaaacggtctttgatagcttccagattgcttaaatccgaaagcttattatatacacgttcctgactataaggtattaccttgacactactctcaaaatttgccataaatatctgttagtataaaataaaaaaagaacgacccgaacagttactgtccgaatggttctttcttttaaatatttgaattaacaataaaatcttactttccagcatcccaatgcgcggggtccttacgccattcattcaatgtttgtatgtcttctttttcgatataacctgtacgaagtgccacatcaagcaccgcttcataattggttaatgtcaccaaagacactttcgcatttttgaatgcctcttcggcaaccgggaatccataagtaaaggctgcaaccataccgattacttcgcaaccatcgcgacggattgcctctactgccttcaaactactaccacctgtagaaattaaatcttcaaccactacaactttcatacccggacgaagttcaccttcaatcaagttttccaatccgtggtctttcggggtagaacgaacatacacgaacggcagatttaatgcatcagctactaaagctccctgcggaatagcacctgtagctacaccggcaatcgcatccacctgtccgaatcgttccaatatcagacgtgtaatttcaatcttcacaaaattacgaagagaaggataggacagagttttacggttatcacagtaaaagggggatttccatccagaagcccatgtgaaagggttagcgggctgaagtttaatagctttaatcttcaacagtttctccgcaaatagtctctctaagtttttcataactaaactaactattaattatttgccgcaaaagtacagaaattgaacgagaataaaaagaagaatccgttatatttttttagtcgaccaattcctcttcttcaggaacatcgatacaacgcttgatatcttttagttcaaatccacgactcatcgcaaacctcattaactttccattcaattcatagtcatcactggcatgaatacttttccgctttgaagctaacaagtcgcgcagaacggagaggtattcttcttcatcaatctcattcagataacgccatgccacgtcagaaggaatctttttcatataaagtccttgggcgattttcatctttccccacttggaaaaacggaacttatcattcacaaaagcacgacagaagcgttcatcatcaataaacttttccgtctccagttggtctagaatgcgcgcaatggtttcataggcaattccccaacgttgtaatttctcatttatctctgcccgacaatgctcggcagtagagcaataagaggctacgcgattcaaagcctcttcatcagttaattgtgcactcatcggttagctgtaactattctatcttttccaaatatgtctttaataacacgaacatcacgatattggttcatttcaagtatgtgtgctgtttcccggccataagcctggttgatttcaaaataaagcttgccacccggcaaaagtaagtcgcaccccagacgggcaatccgacgatagaaccgcaaaggatcatcatcggggacaaacagggcaagtcccggttcccaatcaagtacattggcttccatatcctgcttctccgcctcagttatataaggtggattgctgacaataacgtcataacaagaagtcgcgccgagttcatcagacagcacatctctccgtcgaaacataacccgggcgtccaactctttattattttcactagctatggctaacgcctcttccgaaacatcccaagcctctacttctgcatccggaaggttctgatccaaagagattgcgatacatccgcttcccgtacctatatctaataggtgacgggcacccggattctccttcactatcaattctaccagctctgccgtttccggacgaggaatcaagacaccgggagcaactttaaatttccttccgcaaaattcagcaaagccgcgaatgtactgtatcggctcatttttctgcaaacggaatataatgttttctaattcacgctgtttgcattcggataaaattatatctttgcccatgtaaatatcaagcgcatctaaacctaacatgtcgcaacagatcaacatcgaaagagcttttacctcttccggaggataaatatcctgtaatgactgacggatgtaagtagtgatacgattcatattttcacaatttcggagtgcaaaagtaagaataatatagcgaagagcaccaaaatggaagaagaaaaatacatgagacgttgcattgagctggcaaaaaatggtctatgtaacgccgcccccaacccaatggtaggggctgtcattgtatgcgacggacgtattatcggcgaaggttatcacattcgttgtggagaagcgcacgcagaagttaatgcgattcgttccgtcaaagacgaatcattattaaaacgttctactatttatgtcagtctggagccatgttcccattacggaaaaacgccaccttgcgctgacttgattatagagaaacagattccacgtattgttatcggttgccaggacccgttttcacaagttgcaggaaggggtatccaaaaactaaaagatgcaggacgggaagtaattgtaggcgtattagaaagtgaatgcagacagttgattcgtcgtttcatcactttcaacacgcttcatcggccttatattactcttaaatgggcggaatctgccgatcattttattgacttggaacgaacggacgggcaacctgttgtactctcctctcctctgacttcaatgctcgtacataaaagaagagcagaatctgttgctatcatggtaggcaggcgaacagcattactagacaatccttctctgaccgtacgtaactggtatggacgaaatccgatacgtgtcgtattagaccgtacgttgtctcttcctaatgatttgcagctatttgacggcaatgtgccaacattagtctttacagcaaacaaacatccggaagcaaagaatatcacatatatcacaatcgactttaatcacaacctattcactcagataatggaagaactctatcaacgaaaaatacaatcattactggtggaaggaggcagccaacttcttcagtcatttatagccaatgagttatgggatgaaatatatatcgagaagtgccccaacaagctatattccggtgttaaagcacctgaaatatgcgataaatttagttattcgacagaagaacacttcggaagacagttttggcattacattcatcaagataagctaaaatagtcctattcagggagttttacgtcgataaaatcgacgttattatctataattttatataaaacttgctgggaatgttctttatcggaaaaaatgtttctatttttgcaacttgtaaataaacacaatctttcaaatgagaataaagtttttatcatttattgcgagttttttcatggtgtcattcgttataacgtcatgtcttgacgatgataacaacatcgaatatagtccggacgcgactatacatgcgtttgaacttgatacaacaggccttgggaagtataaattcactattgaccaattgaaaagtgaaatctataatgaagattcacttcctgttcatgctgataccattattgataaaattctaataactaaattgactacagcgtccggtgtcgtgacaatgaaagaccaaagcggcaaggattctatcattaacatcgcagattctattgatctcagaaagcctatcaaacttaaagtatggtcaacagaagcattggccggcacttctcctgatcaaacaagagaatacacgattagtgtacgagtacataagcatgatccggattcattgaggtggaattatgttgctaatattagtaattctgagtccattaaagaacaaaaaacagtcattttaggagagaacattcttacttattctgtagtggataatgtcctcaaagtatatattgcacaaaaaggaaacgcaatgtcatgggtctcaaactctttggaagagaatccatttaagaatagtcttccttcttcaatattgtcatacaacaataaattatatgcaacaacagccgataataatgacggtaacgtgtatgaatctaccaatggtataaaatgggagacttcaggcttatttgaaaatgaacatgtaaatctactcctagctcctttaagtaataaaataacatacatcaagacaataaatgaaacaaaagtttttgcttctactaatgaaataacttccaacgcaaaaacagaccaagaacttcaagttgtaccagatgacttccctattggaaacatatcttatacaacttatactacagcaactggtcttgaaggaattatgctcatcggagaacatgctaaacagccaatagccggagatattgaagctatcgttccatggggatatatgggcagtatatgggtttcattcccaccaaataacgaagagacaagctgcccggtactacaaacccctaccattatgtattataacaaccagttctatatctttggagagaaatttgaatcattctatacctcagaagcaggtcttgcatggaaaaaagcaaataaaaagttctctttcccttatcaggactggagcgaagctgattttaagccaagtaaagagcaaccggaattcagaggtagagaaacctattcctctgtattagacgacaagaatgactatatatatattttatttagcggaggaactgctagttttgaggaagaagtggaagatgaggaagatgaggaaaaaagtagtaaagctactaaaacacatacctacacttatgaatctgaagtatggcgcggtcgtttgaaccagctatggtttgacaaggatccgctaaatgccggtaaataataaacgtatacgtttaaaataagaagatgtcctatatagagcaaatagacaaaactcggatcccccaacacgtagctattattatggatggcaacggacggtgggctaagcaacggggaaaagaacgtacttacggtcaccacgcaggcgcggaaacagtgcagaaaatcacagaagacgctgcacggttgggaattaagtatctgactttatacaccttctcaaccgagaactggaatcgaccacagaaagaagtgtcggctctgatgaatctattgttagattctattgaagaggagacattgatgaagaataatctccgctttcaagtcatcggtgatttcatgaaattacctgctgatgtgcaagctagtctgaaagcatgcatagaacatacagttcataatacaggtatgtgtctggtgttagctcttagttattcttcccgttgggagataactgaagcagcccgacaaatagcagcacaagttaaagcaggagaaatatctcctgaacaaataacagatgagtacatatcctctcacctatcaacaaacttcatgcctgatccggatctgttgatccgcacggggggagaaatccggttaagcaactatatgttatggcaatgtgcttattcggaactttatttttgtgataccttttggccggattttgacaacgaagaactctataaagctatctgcgaatatcaacaaagagaacgcaggttcggcaaaaccagtgaacaaatcagctaacattattcgaaacatcaaattataacataaatgcattatcgtatttcctttatattcgtaacgtttatctgtctgttctgttttgtaacaacaggcattgcgcaagaagccaacactgatgaagactcgaaacctgtcatcttatactccggtacaccgaaacagtatgagatagcggatatcaaagtcgaaggcgtgaagaattatgaagactatgtattgattggaatatccggattatcggtaggacaaacaattactgtgccgggtgatgaaatcactggagcaatcaaacgctactggcgtcatggtttattctccaacgtacaaattacagccgaaaaaatagagggtaacaagatctggttaaaaatcagtctaacgcagcgtccccgtatctctgaggtacgttatcacggcgttaagaagtcggaacgcaccgatttggaaggtaagctgggaatggtaaaaggtatgcagatcactccgaataccgtagaccgcgcaaagacacttatcaaacgatattttgatgacaaaggatttaaaaatgccgaagtgatcatttcacaaaaagatgatccatccagcgagaaccaggttcttgtagatatcgatatcgacaagaaggaaaaagtaaaagtccacgagatacaaatcgttggaaatacagctatcaaagcttccaagttgaaacgagtaatgaagaaaaccaatgaaaaaggtaaacttcgtaacttgttccgtactaaaaaattcgtaccggaaaactatgaagcggataaacagcttatcatcgacaaatataatgaattaggctaccgtgatgcaatgattgtaaaggacagtatatcacagtatgacgaaaaaacagttaacgtctttctggatatagatgaaggtcagaaatattatctccgtaacgttgcatgggtaggtaatacgctctatccgtcggaacaattaaactacctgcttcgcatgaagaagggtgacgtttacaaccaaaagttactaaacgagcgtatttctacagacgatgacgctatcggcaacttatactataacaacggttacctattctataatctcgatccggtcgaggtaaatattgtaggtgactctatcgacctcgaaatgagaatctatgaaggccgccaggctactattaataaaatcaatattagtggtaacgaccgtttgtatgaaaacgtagtccgtcgtgagcttcgtatccgtccgggacaattgttcagcaaagaagacttgatgcgttctttacgtgagattcagcaaatgggacactttgacccggaaaaactgcaaccggatatccaaccggatcctatgaacggaaccgttgacataggtttgcctttgacttctaaagccaatgaccaggtagaattctctgccggttggggacagactggtatcattggtaaactgagtttgaagttcaccaacttctccatagccaatctgctgcatccgggggaaaattatcgcggtatcctgccacagggtgacggacagacattgactatcagcggacagacaaatgctaagtattatcaatcgtatagtatttcattcttcgatccttggtttggtggtaaacgtccgaactcattctccgtatccgccttcttctctgtacaaacggatatcagtagccgttactacaattccagctactttaacaactactacaacagtatgtatagcggttatggtggttatggcatgtacaattatggcaactacaataactacgagaactactatgacccggacaagtctatcaaaatgtggggactttccgttggttggggtaaacgtcttaaatggcccgatgactacttcaccctttctgcagagttggcttatcaacgctacaacctgaaagactggcagtacttcccggtaactaacggtaagtgtaatgatttgagcatttcattgacgttggcacgtaactctattgacaacccgatcttcccgcgctccggttcggatttctcattatcagtacagttcactccgccgtattcagctttcgatggcaaggattataaaggttactactctaaccctaaaacaggtagtatcacccaagacaatatgaacaaacttcataaatgggtagaataccacaaatggaaatttaaaggtaaaacatataccccgttaatggaccctattgctcatccgaagtgtctggtattgatgacacgtacagaattcggtttgttgggtcattacaatgaatacaagaaatcaccattcggtacatttgatgtcggtggtgatggtatgaccggttactcaagctacgcaacagaaagtatcgcattgcgtggttatgaaaatagctcattgacaccatacggttccgaaggttatgcttacacacgtctcggaattgaattaagatatccgttaatgctggaaacaagtaccaacatttatgtgttaggtttcttggaagctggtaacgcttggaatgatatcaagaaattcaatccgttcgacttgaaacgttctgccggagttggtgtgcgtatcttcctgccgatgattggtatgatgggtattgactggggttacggtttcgacaaggtatttggttctaaacaatatggaggaagccaattccactttatcttaggacaagaattctaaaatgtatcaccaaaaaactaaacgtcatgagaaagtctgttctatttatcactctgctgtttgccattagtatggcagctaacgcacagaaatttgcattgatcgatacggaatatattatgaagaatattccggctgctcaaagcgctaatgaacaaatgcaagaagctacgaagaaatatcaggctgaagtagaagtcttggcaaaagaggcacagaaaatgtttcaggactaccaagcgaaatcgtcaactctttctgctgcacaaaaaacaaagaaagaggatgaaatcgtagccaaagagaaggctgccgctgaactaaaacgtacttattttggtccggagggtgaattggcaaagatgagaaacaagctgattactccgattcaagatgaaatttatgaagcagtaaaggctgtatctcaacaacatggatacgacatggtagtcgatagagcctctgccgcaggcataatttttgcaaatccgcgcattgatatcagcgatgaaatattaagaagattaggatattcaaattaatttcatacatttgcaactggaaataactaaaaatcattcaaataaattatagaactatgctaaaaaaaatcgcacttgtaatgttgcttgcactcccaatgggtgtatttgcacagaacttaaaattcggtcatattaacgcacaggaaattatcactgtgatgccggaattcacaaaggctcaaaatgacattcagaatttagaaaaacaacttactgctgaacttcaaagaacccaagaagaattcaacaagaaatatcaggaattccagcaagctatcgctaaggattctcttccggctaatatcgctgaaagaagacagaaagagttgcaggatatgatgcaaagacaagaacagttccagcaagatgctcagcaacaaatggcaaaggcacaaaatgatgcaatggctcctatttacaaaaaattagatgacgctatcaaggcagttggtgccgctgaaggagtaatttacatcttcgaccttgcaagaactccaataccttatgttaatgagacattaagcatcaacctgactaacaaggtaaaagctaatctcggtattaaataagcaataagagtaagaaattctaaaagggaaagggaaaagaagcacagacttctttctctttccctttttttcatgtacatttgcgtatataaattctcatccgttatgaaacaacagttaccctatccccccggaccgatcggagtatttgactccggatacggcggactgactattctcaataagataagagagatattacctgaatatgactatatttatctgggagataatgcccgtacaccctacggaacacgttcttttgaaatcgtatacgaattcactctacaagcagtcaacaagttatttgaattgggctgccatcttgttatattagcttgcaacacagcctctgccaaagcattgcgtagtatacagatgaacaatctaccgaagatagatccggaacgtcgtgtactcggagtaatccgtcccacggtagagtgcatagggaatataacacaaagccgacatatcggaatattagcgacagcaggtacaatcaaatcagagtcttacccgctggaagttcataaactataccccgatattcaagtaaacggagttgcctgcccgatgtgggtaccattagtagaaaataatgaagcacagaatgaaggagcagattatttcatccggaaatatataaatcagttattgcagaaagactcacagattgacactgtgattctgggttgtacacattaccctctgctacttccgaaaattcagcaatatattccggataatatccgcgtgatcgcacaaggtgaatatgtcgccgaaagcttaaaagattatttgtgcagacacccggaaatggatattaaatgtactaaaaataacagttgtttgttttatacaacagaagcggaagataagttcatcgagtcagcctcgactttcctaaaccaacagattaatgtaaaacgaatcacgctcgaataaaattctggaaaagaataactatttattgccatttcttgttatatttgtaaacaacaacccttaataccataagatcatgaaagaagaagattacagcaagtcgatagaagtattctccggctctccgtgggaggcagaaatcatcaagggattattagaaagcaatgacattcgctgcgttatcaaagatggaattatgggtacattggcaccctatattgctccggcagtctctgtccttgtcactgaagacgaatacgaatccgccaccgaactaatcagaagtcgagctgaaaaagataacgactaatacacttcaggccttctctgatattcttcagtgaattggcctaggaggaccgtatgtatatttttcacctcccgtacccaaattgacacagggagtaatattgatgtgtgcactttcaaatatgatgaaggaagtcatctgttctacttgtagattcgtatatctcattatttactttttctctatcaggatgctaagataattcttttcagcccgttttggtaacatatcgataaaaagttctatatttgtactttcaaatcgtcagtaaattagcaaaaatgaaacaggtatttacacgggttgcagtaaaggtcggtagcaatgtattaacacgccgagatgggacgctggacgttactcgtatgtcagcgcttgttgatcagatagcagaattgcataaatcgggagtggagattattctcatttcgtcaggagcagtagcgtcaggacgtagtgaagtatccccacaaaaaaaactcgacagtgtagaccaacgccaattgttttctgcagtaggacaggcaaagttaatcaatcgttattatgagcttttccgcgaacataatattcctgttggccaggtattgactacaaaagaaagttttggcacacgccgccattatctcaatcagaaaaactgtatgacagtgatgcttgcaaatggagtaattccgattgtaaatgaaaacgatacgatttctgtcagtgaactgatgttcaccgataatgatgaactatccggactcattgcctcgatgatgaatgtacaagcattgattatcctcagcaatataaacggaatttataatggttctccttcaaatccggattcttccgtcattcgtgagattgagcatggaaaagatctatccaactatatccaagcttccaagtccagtttcggccgaggggggatgttgacaaagaccaatatagcccgcaaagtagcagatgaagggattacggtaattatcgccaatgggaaacgagataatatcctggtcgacctgcttcaacatccggatgaaactctctgcacacgattcattccttccaacgaaccggtatccagcgtaaaaaaatggattgcccacagtgagggattcgcaaaaggtgaaattcacattaataagtgtgctaccgaaatactaaattctgaaaatgcagtcagtattcttccgatcggtattacacgtattgaaggagaatttgaaaaagacgatattgtgcgtatcatggattttcagggaaatcaggtaggaatagggaaagtaaattgtgatgctagacaagcaaaggaagctataggaaaacatggtaaaaaagcggtagtacattacgactatctatacattgaataattaatcgaaagaaaaaaaagtgtatggttactaacttaaacgaaaccttcgctgccgtacaagcagctagccgtgaattggcaatcctggatgacacaataatcaatcagatactaaatgcagtagctgatgcagctattgcagagacaccgtttattctggcagaaaatgaaaaagacctcgcacgaatggataagaatgatccaaagtatgaccggttgaaactgacagaggagcgtttgaaagacattgccacagatacacgtaatgttgcaacgcttccctctcccttaggaagggtgttgaaagagaccatacgccccaacggaatgaaactgaccaaaatcagcgtgcctttcggagcaataggaatcatctacgaagcacgacctaatgtgagtttcgatgtattctccctttgcctgaaaagcggaaatgcctgtgtattgaaaggaggaagcgacgccgattattccaaccgggccattatctgtgttattcacgaagtactaaaagaattcaatatcaatccacatattgtcgagctactcccagtcgatagagaagctacaacagcattactaaatgcagtaggttatatcgatctggttatccccagaggaagtagtaaccttatcaattttgtacgcaacaatgcaaaaatcccggtcattgaaacaggggccggtatttgccacacttactttgatgagtttggagatgtaagtaaaggggcagatattatttataatgccaaaacacgcagagtcagtgtatgtaatgcattggactgtactatcgtacatgaaaaaagactggataagcttcctttgctttgcgaaaagttaaaagacagcaatgtgattatatatgccgatccgcgagcctatcaggcattagacggccattatcctgccgaacttctgcaacctgcaacgaaagaaagtttcggcacagagttcttggactataaaatggcggttaaaacagtgaagagttttgaagatgctttgaggcatatccaagaaaacagttccagacacagcgaatgcatcgtcacagagaacaaggaacgtgcagcgttgtttactaaaatagtagatgctgcttgtatatatactaatgtctctacggccttcaccgatggagcccaattcggtttgggagcagaaataggtatcagtacccagaaattgcatgcacgtggtcccatgggattggaagaaatgacctcatataaatgggtcattgaaggaaatggacagacaagatggtaatatgtatgtaatagtgaactataaactgtgaatagcaaacagttgaaagataaatcgtataataacgaattaattatagaaaacatgaagaaatttacttgtgtacaggacatcggcgatttaaaatcagcccttgcagaagcatttgaaatcaaaaaagaccgcttcaagtatgtagaattaggacgtaacaagacattaatgatgatcttcttcaattccagtctacgtacacgcctcagcacacagaaggccgctttaaatctgggaatgaacgtaatggtgttggacatcaaccagggtgcatggaaactggaaacagaacgcggtgttatcatggacggcgacaaacccgaacatttactggaagccatccccgtcatgggatgttactgcgatataatcggagtacgctcttttgcacgcttcgagaatcgtgatttcgattatcaggaaacgattctgaatcaatttatccagtattcgggacgccccgtattctctatggaagcagcaacccgccatccgttgcaaagtttcgcagacttgatcaccatcgaagaatacaaaaaaactgtacgtccgaaagtggttatgacttgggctccgcatccgcgtccattaccacaggctgttcccaactcatttgccgaatggatgaacgccaccgactatgatttcgtcattactcatcccgaaggctatgaactggctccacaatttgtaggaaatgccaaggtggaatacgaccaaatgaaggctttcgaaggagccgactttatatatgccaagaactgggcagcctatgcaggcgacaattacggacagatattgagtaaagaccgagaatggactgtcagcgaccgacaaatggaagtgactaataacgctttcttcatgcactgtcttcctgtacgcagaaacatgattgtgacggatgacgttatcgaaagtccacaatctatcgttatcccggaagctgctaaccgtgagatctcagcgacagtcgtcttaaagaaattacttgaaagtctataacatcatgttcaaaagtaaactaataatcatattgctatgcctgtgcgttgttgcaggcatagcaaatgcccaagaaaaaaagcctcaagtaatacagtcagaaccacaattagaagatatctataatgtactggaagctatggacattcacatgttccgttttgaattaaaagagtttctgaacaaagtatatacggtcactgtctacatggatgagtatgagaatggaaaatcccccaaacaagtgcataatatcagactcgggaaaaacattcagtctttaaatgcagtaccagaagaacatcgtcaagctttccgggaaataaaacatattccggaaggcaagaacgaatgggagaatatcaaagagatgtcaatatatcttagaaagtccaatgattcgacttcagtttgcactattaatgtaccgggaacgatgaaaggtggtgcaccattaaaattacaggcaatagaaaaataccactcttatatttattacccgcgcctatttaaatttcagcctatacaagacacagaccatttgaaaattcctttaattttatatggttccgcttggctggacaagcaacatgacatcatccgattttgtggagaaagagaaattgatccggaaatgaaagcagaaatccttaaagacataccccattattttgtaataggaatagagcttaaagctgagaaagagtgatcaactttttatttttagacatggactaaacgaatagacaattctctattaatatcaccgccacaccgtcaaaccaattaatccatgtctaaaacctatatttttcaccacatcgactaatgctcaatctccttgcctgcctcctgccaagaattgaatcccttatcaagttcaaagaccttataccctttctcactcagaatattcgcagcctttttgctccgcttgccgctacggcaatacacagctaccggtttatctttttgcaacaacgagtctgccattgaagcaaaagaatcatccattacattgatattgattgtctttgcaatatgtccttccgaatactctgccaaagtacggacatccaaacgctgtatatcctcattctgaatgaggttatcaaaatcatccacgttcatagacttgaaatctcctttctgctgacaagagaaaagagaagagagaaataaaaatagtcccacagctagttgattcattttaaacatcatactctattattcaattcttatccggaacatattcaaatccggggttacagtacttaccagattctattgcagtgccgtccttatcatacgtataatatttgaacttaatcgttatcttttgaccgggattctctgcatccgcatatttatccaaaggaacagagagataagcacgacgattgtagtactcctcatcaccattcgcatcatggtacaataacatatttacagtaccatttgtttcaaattcggacaaatcttccactatgccgaaaacatgctgtttaccaccattaaccttgagattcagaatcatattcagataacctcttcccaaccagatactgacaacatctaccggatcatgctttaacccgtctttataagttggatcatctgccggtttaggtgtcggcgtaacaagagattgcaaagaataaatcacagctgtagccgtgtgcccgttcgaaagcgtttcataattactcattacacgcctggaagtatttggcgaaatagcagaacccgtacgatctttagatacagtcaacgcttccccattatcaggaatcaacgtctgtatactaccatccgttccagccttcactgttacaaattccaatttaaccgacggataataataatcatcctccccacaagcggacatcagcaaaagtaatccccaaaaccagactatatgtaactttcttattctcatcgacacgcagctaaatggtttattaatggattggcatacattaataacaacttctcacgcagaaaagcttcatccttattaggaatctctattttacccaattgttgctcaatatagcctacaaactgctgtttctcctcctgcgaataaatcccggtaaactctgtcgtcccattcaaccagtcataagcgacgtaatttcccggatacatccggtaattacgataaattctctgatcaatacaagcagaaatagcagcaaacaactccggtttcggtaacgagcggtctatttgttccagttcatcatttatgcaagaagcaacttgaaaatgcaccttacctttatatccgaaaagcccggtttgcatattaatcaagtcgtcctgtgttgtttttttatatccttctatatcccttttcaactgaaattcacgtgctttcaggaagtcgcaaggatcatattcgtatgaaatggcaagcggagcaatattcatttccttcaagcgatctatcaaatctccttcacctcccattgccagcattttcaggacactatcttgcgtgcggtcattagaatccttcgcccgtccttcacgctgtgcaatccaaatagattgatttttctctgcaatggtataatgcatatatcgggacatccgcgtcgaagcctccaacatctggcgcatcgtaagtgcccgctgaacaataaaagacttgttgacacgcaccagcttctttatccaaggataaataagtaagttatcaccaatagcaatctctaccgtatccattccctgatcgaccaacagaatagaaaggaagcctgaatccaagataatatccctgtgatttgaaatatatgtataggctttcttcttattcggcaaagcattgtgatctaatgtcagcccatttgtatgttcttctgctatcttccacaaaataccataacaaaatgctttctggaaatcaagtttcgtcttacacgtacgcattttctgcgccagaagttcaaatggaacgttcggtatagctccggtagcagctttccgaaaagccggatcggcaatcagttcctcaaagatttgaggaagctcctcatcattataaggacgaatctcattaaactctgtcagatccataacggtaattaaaatttattttcgataatatcagtcatcacatcctttatctccagaccggcagcacgtacttgctggggaataaaacttgtcgcagtcattcccggagtggtattcacttcaagaagattaatcttttcaccggctgtaacaatataatccacacggataatgccggaacaacccaatatatcatagatagccgaagtcaacatctgcacccggtcggtcagttcgtccgaaatgcgtgcaggagttatctcgtctacctgcccattatatttagcatcataatcgaaaaactcattatgagtcactacttccgtaggcggaaaaaccactgacttttccttggttttataacaaccgcaagtcaattccgtaccttccataaaagcttccacaagcacttcttccgcctcaccgaaagctttaacaatagccggttggatttgttctttcgtcttcaccttcgtaactccaaaactggagccacccagacttggtttgataaagcaaggcaaaccaatcttttccaagacatcctcgtcggacaccgattgtccctgacgcaataacaatgattcggcaatacgcactccaaaggctttcagatattgattgcaagcgaacttatcataggtaatggcagctgccaacactccacaacaagaatacggaatacgcatcatatcgaaataaccttgcaaacgtccatcctcacccggcgtaccgtgaatggtgatataagcaaaatcgaacacaaccttttccgttccgttcataaaactaaagtcatttctgtctaccggtactttatttccgtccggtaattgtacctcccagcgacggccctccatctctacgatgtacaaattatacttttccttgtcaataaaggagtaaataccctgtgcactacgcagggaaactacgatttcagaggtatcccctcctgctacgatagcaatgttgcgtttcattctaattctctgttacttatatagcctctccacttctcgataagccgggccatgtcatccggaagttcggaagtaaaatacatctcctcaccagtgacgggatgcacaaagcccaacgtcatagcatgcaaagcctgtcggggacaagtgtcaaagcaattatttacaaactgtttgtacttactaaaatgagtacctttcaatatctcatgaccaccataacgctcgtcgttaaacagtacgtgcccgatatgtttcatgtgaacacgaatctgatgagtacgtccggtttcaagtatgcactccaccaaagtgacatatcccaaccgttccaatacccgataatgagttacggcatgttttcctactgccgggtcggacatcaccgccatttgcatccggtccttcggattacgggcaatgttaccgacaatcgttccttcatcctgttccacagttccccacaccaaagcacggtacttgcgtttggttgtcttattaaagaactgcaatcccagatttgttttagcatccggtgttttggcaatcaccagcaacccggaagtatctttatcaatccgatgaacaagcccgacgtgagggtcattagcatcataatcaggcacatctttcatgtgccaggccagtgcattcaccaaagtgccgtgatagtttccgtgtcccggatgtactaccagccctgcaggcttattcacaaccattacatacttatcttcatatacgatattaagaggaatatcttcaggaataatttcattttcataacgcggacgatccattaccacagtaatgacatccaacggcttcaccttatagctactcttcaccggcttgccgttagccataacgaatccgtcttcggcagccttctgaatgcggttacgcgaagcgttgacaatacgttcgaatagatatttgtcgactctgaccatcgcctgccccttatctaccactacacggaagtgttcgtagagttgcgattcgtcaccgacaggttctatatcatccaagtcattttccaattcatcaggaagttcttcctctatcatgcgagtctgtttctgttgtttatcaattaaaaccaactatcatcttgtgtggatgatgattctgacgccaccggctcttccgtgtctagatcgatatcaatagaatcttcttccactgtatcaccggctccatctcctaccattaatgtcaaggaggctcccatagggattttctcccctaccgttaattggcgtccctgatatttcacaccatacacccagtctttctctccattgaccaactgtacttcgttcaatttaaacccggcactcagcaacttagcctgtgcttggcgaagagaactgttatcagcaacatccggaatcacacgcaacggcacatccaaggtattaaccgtcagatagaccgtacgtccttctttaactttctcaccgacccccggcttcagttcaagaataattcctgccgctttatccttaacatacttagtatccgagatcaccgccaccaatccacgattgcggaacatctttgcagcctcttccgtagtcatacctttcacatcaggcacaaccacagtttctccatgatgggtgtacacatccatccatttcagcacaccgaatatcattactaccactaccacaatcatggcaacaatattcagccagaaaaatttatttgttttaaaagaaaagaattctttaatagtcatacgctttgctgttaatatgcgccaaagatacgacaaaatagttgaatttttgaatagtaggcaatgaaaaatgtcctacctcatgatgttaggacacttatcattgccggaattgttgcaactataatccccactcctatagatttcaacaaccttattattttcatccggggggttcatttcccgaatatattcccatattatacacagcttgtctacaaatactgattcatatcacaaagaaaagcaaaaaagcaacaaacaagaataaacagctgaatgttttaacattctattagcaaattaaaaatcagaagaaacaaaaaggcgaagaataactcttcgcctttttgtttcttctgatgactagtgattaccacttctgtccattgtactcatcagaaacagtcagtttctttctgccttttgcacggcgagcagctaacactctacgaccattagccgatgccattctctcacggaaaccgtgtttgttttttctctttctgttagagggttgaaatgttcttttcattactgtatcttgttttttatgttattattctacgtaatcgggctgcaaaaataggcactttttttaaattaaccaagagataactcatttttgctcaaaagtttttgtgttttttaccgatttagattacttttgcatccgaattcctacgaaaacaattaaataacaataatataataagaagaatagcagtatgattaatgctcaagacatcaaaaacggaacttgtatccgtatggacggaaagctctatttctgtatcgaattcctacatgtaaaacctggtaaaggtaatactttcatgcgtacaaaactcaaagatgtagttagcggatacgttcttgaacgtcgtttcaacatcggcgaaaagctggaagatgtatgtgtagaacgtcgtccatatcagtttttgtataaagaaggagatgattatatcttcatgaatcaggaaactttcgaccaacatcctatcgctcacgatttgattaacggcgttgacttcttgctcgaaggcatgactttggacgttgtctccgatgcttctacagaaactgtactctatgcagacatgcctatcaaagttcagatgaaaatcacatatacagaaccgggcctgaaaggtgatacagctaccaacacactgaaaccggcaacggtagaatctggtgcaacagtacgcgttccgttattcatcaacgaaggcgaaacaattgaaattgatacacgcgacggttcctacgtaggacgtgtgaaagcataattgttatataaatgacataaagaaacggtggatttgctacggcatctccaccgttttttattaactttgtgccacactaactctatacaaaaatataaaagaatgaaaaagttaatctacacgttattctttgtcctcatctccgtcgttgcaaacggtcaggcaaagtacgtattctatttcatcggagatggaatgggagtcaaccaagtcaatggcacagagatgttccaagccgaattgcaaaacgggcgtatcggtgttgagccactactgtttacacaatttccggtagctactatggccactactttttccgctacaaattctgttaccgattctgccgccgcaggtacagcactcgccaccggaaagaaaacctacaaccatgcaatttccgtgaatgaagagaaaaatgccatacaaacagtagccgagaaggctaagaaagccggtaagaaagtaggtgtcaccacttcggtcagtgtagaccatgccactcctgctgcattttatgctcatcaaccggatcgtaatatgtattacgaaatcgctctagacctgccaaaagctaatttcgatttctacgcaggcggtggttttctaaagccaaccactacgttcgacaacaaaaaggctccgagcatcttccctattttcgaagaagccggttacaccgtagcacgcggttacaatgattacaaagcaaaatcccagaatgccgaaaagatgatattgatacaggaagaaggagcaaatccttcctgtttgccttatgctatcgaccgtaaagacaatgatctgactcttgcccaaatcaccgaaagtgctattgactttctgactaaaggtaaaaataaaggctttttcttaatggtagaaggcggaaaaatcgactgggcttgccatgcaaatgacgcagctaccgtattcaatgaagtaaaagacatggataatgctatcaaagtagcgtatgaattctacaagaaacacccgaaagaaactcttatcgtagtaacagccgatcacgaaaccggtggtatcgtattaggtacaggcaaatatgcattgaacctgaaagcacttcaacatcagaaacattctgctgacggcctttccaaacgtatcagcgaactaagaaaatccaaaggaaacaaagtgacttgggaagatatgaaaacattccttggtgaagaaatgggcttttggaaacaattccctatttcttgggagcaagaaaagaagttacgcgacgaatttgagaagtcattcatcaaaaacaaagtagtatttgctgaaagtatgtattccaaaagtgaaccaatggctgcatgtgccaaagaagtaatggacgaaatctccatggtaggctgggtaagcggcggccattcagcaggttttgttcctgtattcgctatcggggcaggttctcacttgttcagtgaaaaaatagacaatacggagattcccaaaagaattgctaaagcggcagggtacaaataagatattaaataataagtattaagtattagtttgcgctataactgcatagaattaatgcttaatacttattatttatttctaagcttgtgtctctccttctatataatcttcaaggaaaaggttttcgccgtcgaatactgcatatgaaaaataattaatccagtccccaagaatcaacacgcgtgaagtggtactcaacatcagatccagttcaatgtgacgatgaccataaataaagaagttgatattaggatgacttttcagatactccttcgtatatagtaccagatgttcctggttttctcccatataatccggttcctttccgtcagcccgtttctgtcggctgtgttttgcccatgtcaatcccaattccacactccaacgaggatgaatggcggaaaatagggtctgcaatgttttgctgtgaaacatggaacgaagtaatttgaactttttatccgggtcaccaagtccgtcaccatgagcaagatagaactcttttccatagatctcagtagtcaatggttcacggtgcataatgacaccacactctttggtaagataatctccgcaccaaatatcatggttaccggtaaagaaatgtacttctactcccatatccgtcagctcggaaattttccccaggaaacgggtgtaacccttaggtacgaccaaccggaattcataccagaagtcgaacatatctcccagcagataaacggcagctgccttgtgctttatactatcaagaaaattcaccaaacgccgttcctgtgtacgcccatgttcaatagcacgggaaccaagatgtgcatcggaaaggaaatagacattcttcataaaaaacccagttccagtttagcctcttcactcatcatatccttatcccattccggttcaaacaccagattaatggtagccgagttcactccttccacagattctatcttctggcgaatatcttccatgataaaatcagcggccggacagttcggtgctgtcagtgtcatatccagcaccacttccccattatcagagacatctatcttatagatcagcccaagatcgtatacattcaccgggatttccggatcgtacacagtttttagcatggctacaatcttttcttctatttcaaacttttccatacgttcttatttatgtattgcaaagatagagataaaaaattagacacggaatgcgtacctaactaaaaaacataccgagagactaaattgttgcgggaaatattcatcaatcgtttcagagcagcccttcatctgcaaagctgtaaaagccgtcctcacagactatgacatggtctatcaggcgaatattcatcgtatccgccgctttacggatatgttccgtcaatgtcctgtcaggctggctaggctgaatatttccggaagggtgattgtgcaccacagctatttgtgtagccctttgcatcaatgcttcccgaagaatggaacgcacatcggcataagtaccgtctataccgccggaactgatacgtatcttatcaatcagtttcgttgcctgattcaacaacagtacccagaactcttcttgcgccaggtcgcacattagtggttgaaaaatctcgtagatatcttttgagcaggtgatccgaagtctctctctgatgttttgcaatttccgccgcttgcctaattcaagggcggccataaccgtaatgctctttgccggtcccattcctttaaaacgggaatagtcgcacacttcccacttcgccaaagtattcaggttattatcacaggacaaaagcaggcgtcgcatcagttcgacagcgctttcttccgtattcccggagcctattaatatagcgagtagttcggcgtcactcaatgcggctgctcccttctctatcattttctcccgcggacgatcctccggtgcccattggttgatagataacttgtgtttgttttccattttctatgttttgaaagtgtaaaggtagacttattttatttaatggcaggggatatagaaaagaaaataaaataccggtggtatttccctataggaaactgaaagtttcaagccttgggaactttagtttcaagcgtctgaaactaaagtttctccatgatgaaactaaagtttctctaccgcgaaaccaaaggttccaatgcatgaaactattggttttgccgtattaatttatagtcatataagtatcctagttcataaccgtgaagacacaattcagaatcatacgagtttacttataaaagttcttttgaaatgcttcaaactcatcttttcctctgatgcaacgttgccaccatgcacgccagaaacctgtaccatagcctataagctgaataaatgcggcagcaatggaatatattccgatacttaaactcttattttgaatcgtcgagtctatacagaccaacagtgcataaagaagaataggcgtgaaactaaacagacaaaacggtgtccccaataataaaacagctactcctaatgtaaagaccgccggaagcagatgcaccagtttcaacgaatcagggtacttcttataaagattgatacgggcaataccggagttgtgcacttgtttgaagaatttcttcaagtctgtccggcgcttatgatatacccaggcatccggaaaaaggcgacaggtataaccacctttaaaaatacggatgctgaaatcaatatcctcgccgaaacgcatctttgagaatcctcccaaggtttcatacaccgtccgacgtacccccatattgaaactacggggatagaatttatccattttcttttttccgccacgaatacctcccgttgtgaaaaaagaagtcatggaataattaatcgctttctggatatccgtaaaggaatcgtgtgcgcggtcgggacctccaaaagcatcggcaggagaagcgagaagttccgcctcgatggcatcgaaatatctctcggggagaatcacatcagaatccagtataataaggtattcaccctcgctgcgttccgctccgtagttacgtgtttgccccggtcctgaatttggcttagagaaatatttgatattcaaccggtcaatatagcggtctgttatttctttgcagggaatggaagaaccgtcttccactacaacaacttcaaaatctttaaagtactgtgccgtgagactttgtaatagttcatccacttcatcgggacgattgtaaacggggattatgacagagtaacgcatagtaaaatactggatataactgtttgatatgcaaagtaaaggaaaaaaaatgagactgatacaggaatgataaatttctattcattaaaaaaggcgacacttttatagagccgccttatcatatatacaaaagtatgtttattacttattcagaatatccattgtatccgaagcaatcagcaattcttcatctgtcggaatcactaccacttttaccttagaagcaggagtagaaatgactgcttcctcaccgcgaaccttagcattcacgtcattatcaagttcgatacccatgaattccatgtctttacaaacttcacgacgacattccatctggttctcacctacaccacctgtaaacaagatgatatccacaccacctaatgcagcagcataagcaccaatgtatttcttgatacgataatagtacatcttctcagccagaattgctttttcattaccggcagcacaagcagccaataattcacgcatatcgcttgatactccggaaatacccaatacaccgctcttcttattcagcaaattagaaactcctgttgtattcaagccttccttttccatgataaatgtcactgcaccggcgtcaatatcaccactacgagttcccatcatcaaaccttccaatggagtcagtcccattgtagtatcaatacatttaccgtctttgatagcagcaatagagccgccattaccgatgtggcaagtgataattttctttccttccggattcacacccagaaattcacacacacgttttgatacataacggtgagaagttccgtggaagccataacgacgtacaccatatttctcgtacaattcgtaagggatagcatacatgtaagcataatccggcatagtctggtggaaagctgtgtcaaatacgcctacctgcggaatattaggaagaatagcggaaactgcgtttactcctttcaagttggcaggattgtgaagtggagccaagtcgttacaagcagtaaatgcttccaatacctctttattcagcaatacagattcgctgaaacgttctcccccgtgtaccatacgatgacctacggcattgatttcatccaatgacttgatagctccatattcagggctaatcaatgtattcaggataaactccacacccactgtatgctccggaatatctttttccaggattttcttttcaccattcggcaaagtcaatttcaggaatgaacccttcagaccgattttttcaataccaccttgagcaattacctctttggtggtcatgtcgaacaatttgtatttaatagatgaactaccacagttcaatactaaaatcttcatatcgttttattatttaatatccgttatttatttgttagcttttgctgcaatagcttgattagcagtgatagcaatcatacggtaaacgtcttcgatagagcaaccgcgtgacaggtcgttcaccgggcaagcaattccctggagaatcgggccgatagcgtcagcatgtcccaaacgttgtaccagtttataagaaatatttcctacttccaagctcggaacaatcagaacgtttgcctgtccggctacgtctgaacccggagccttacttgcacccacttcaggaacaagagcagcatctgcctgcatttcaccatccaagtcgagagtcggagccatttctttagcgatcttcgtagcttccacgactttgtctaccacttcatgttttgcagaacccttcgtagagaagctcaacagggcaactttcggattttcgatacctgccacagctttagctgtttgagctgtgcacacagcaatctgagctaactggttagcatccggtaccggagtaacagcaacatcgcccattaccaaaattccattctttccatattcaggagcgtgagttagcaacaacattgcacctgatacacaagtgattccgggcgctgtcttgataatctgcaaagcaggacgcaatacattaccagtagtgttgcgtgcaccagccaactggccatcagcatcaccgctcttaatcattaaacaaccatagaacaaaggatcattcgtcaacttacgagcttcttcaatagtcattcctttctttttacgaagttcacacagcaattgtgcatattcttcgtgtttcggagaagtctcaggatcaataatagtagctttaccaatgttgcccaatccccattttacagcaagttcgatgatttctgccggtttacccagtagaataaggtcagcaacttcatctgtcaaaatctgattggcagcttttaatgtgcgttcttcagttccttcaggaagaacaatacgctggcggtttgctttcgcacgcgccacgatttggttgattaaattgagcatagaaatattgaataatgttataaaacctggttacaatttataatttgcggtgcaaaagtactcaattttgtaatatacacattacaaatccgcccatttttcgaacccaagtctaaaatattataatatttaacactgtacttctattttttctacctttgcagcgttttcaaacaaatcaataggtaattagtatgatacgtcagtgcgccattttatttggctgtttggctttgggtgaattaatagtttatcttacaggcatcaaacttccctccagcatcataggcatgctgctgctcaccctttttttgaaattaggttggattaaactacactgggtgcagggcttatccgactttctggtagctaacttaggtttctttttcgttccgcccggagtggcgcttatgctatattttgatgtaattgctgccgaattctggccgatagtgatagcaacaattgtcagtaccgcccttgtgctagtcgttacgggttgggtacaccagattgttcgtaagttcaggctggcgcgccaaataaaactggcgcgtaaacttcatttaccggatctccatctatcggacagacttcgtttaaaagataaaatcaacttaatgaataaagacaaatgagctttttagaaaatgactttttcctgttagctgtcactttcgggattttcttcttcgccaaactactccagaagaaaacaggactggtattgctaaacccgatattacttacaatcgcagtgcttattatttttcttaaaatgacacatatctcttatgagacttacaacaaaggcggacatcttatcgaattttggttacgtccggcagttgtagctttaggtgtgcccttatatcttcagttggaaatgataaagaaacaacttttaccgattcttctgtcccaactggcaggatgtattgtcggagttatttcagtagtgctgatagccaaactcatgggagcttcgcaggaggttattctttcactggctccaaaatccgtcactacgccgattgccatggaagtaaccaaagctatcggaggtattccgtcactcactgcggctgtcgtggttgcagtaggcttactaggcgctatttgcggttttaaaacgatgaaaatcatgcatgtaggtagcccgatagcacaaggtctctcaatgggaacggctgcacatgcggtcggaacctccactgcaatggatatcagtagtaaatatggagcgtatgccagcttgggcctaaccttgaatggaatattcacagcattactgacacctactatccttcgattattgggtgttttgtaaaaacaaaaatccacaatttttcgttatataagagttaaacgcaaaaaacaatcacatgatttcatttaaagatatcacattagcagataaagacacgattacctcattcacaatgaaaagtgatcgccgtaactgcgatctttctttttccaacctttgcagttggagatttttatacgatactaaatttgcagtagtcgacaatttcctggtgttcaaattctgggcgggagagcaacttgcctatatgatgccaattggaaccggtgatttaaaagctatattacgcaaactgatagaagatgcagataaagagaagcagtctttctgtatgttaggagtttgcagtaatatgcgtgtagatcttgaaacaactcttcccagccagtttgttttcacggaagatcgtgattatgctgattatatttatttgaaaagtgatctttctacattaaaaggaaagaaattccagtcaaaaagaaatcacatcaaccgtttccgcaatacatatccggattatgaatacacaccgattactcccgatcgtattcaggaatgcttggatttagaagcggaatggtgtaaagtgaataactgcgatcagcaggaaggaacaggtaatgaacgccgagctcttatttatgcactccataactttgaagcccttgggctgaccggaggcattcttcatgtcaatagcaaaatcgttgcatttactttcggtatgcctatcaatcatgagacgttcggtgtacatgtagagaaagcggacaccaacattgaaggagcgtatgccatgattaattatgaatttgccaaccgaattcccgaacaatatatctatataaacagagaagaagatttgggcatcgaaggtttacgcaaagccaaactatcttatcagccggtgacaattttggaaaaatatatggcttgcctccaagatcatccgatgaatatggttaaatggtaagagacaacctatggtgtatcagattcagtatgttataacaacaaaatcctaattgtcacaacacacagaatctgatataacttattaatcagccataatctttatatccggtgacggaatccgataccaatattctactcccggttcttctcttcccgggattttaaatgtcaacttaattaagttatcatgcaagcgttcaacactgatttcgttttcaacacctgcggggaaaactgagtaaacagattttgtaatgttctccacatagatactatccgactttaattcatattcgccctgaaccagaattaccgaacccattttattagtatcaataatgatattcatgaatgtattatcgaccgagataaatttcaacaatgggcctagtgacaatctgtaacccttttcgaccgattctaccatacatgtctgccataccccttgcattctcttattctttatctcctgtccattgggtatcacaagtttgaacgggacattttttgaactatttttttgtagactgaacataatgggaaccgtgaatttcaccttgactgtcttgccgtctactattcccggagtccatttaggcatttcttttaccacacgtaaagcctcttcatccaataaagggtcaacacctcttattacctttgcctgacttagtgttccatcttccataactacaaactgaacaataacacgccctgagatagcatttttctgtgcttccaccggatatttgacgttcgaagacaagaacttcatcatggccggaacgccacccggatactccggcattttatcaggaatcaggtaaacgccatttacatccaccttctgtatcggttgctcctgtgcaactaatagtgaacaagcaaataaagagataatcagactaagtagttttgttttcataatatattaatttaagagttagaacagcaaatcaattatgcaataatacctaaaaaagaatgaaatcacaaacattattgaacatttctactctcctcatacgtttttaaggtacctttgcagaaataacgaaaaaaaaactaagcatacaatgaaagaaaaagtaaaagcattatggaagttgtgtttcgacgatagtgatcagttcatcgatatgtacttcagactacggtataagagtgaaataaatgttgttattgaaagcgggaacgaagtgatttccgcccttcaaatgcttccttaccccatgagtttttgcgggaaacaggtagctacttcttatatatccggcgcctgcactcatccggactttcggaacagaggagtaatgcgtcagcttttatcacaagcttttgcccgaatgctaccgaacgggatcttcttcagtacactgataccggcaaatccgtggctattcgattattatgcacgcataggatatgctccggtgtttcaatattctacgaaagaaatcattcttccggagtttattccttccaaagaaataaaggttgatatcgtgtccgaatataaggaagaagtatattcctatttgaataagaaacttgcggaacgcccttgttgcatccagcatacaacagaagattttgaggtaattatggctgatctcgctatcagtaatggtattttgctcgtagccaaattaaataacgaaataaacggaatagcgattgtgtataaaagagacgaaagcgtcattatcaacgaacttctcgtagaaactaaagacgctgaacatagtttattgtttcatctcaaacaacataccggatgtaatcgtatgattcaattattacctcctgacaaaaagcggcctcaacaagcattaggaatggcacgcatcatcaatgcaaaagaagttctacaattatacgctgccactttcccggaagatgaaatgcagatagaggtatcagacaagcagttatctgtaaataatggttattactacttatgcaaaggaaaatgtatgtatagcaccgaacgtttgcccggtgcacacatacaaatgaatatcactgaattaactaacagaatcctccaaccgttaaatccctatatgagccttatgctgaattaaaagcatctattttatttattcagataacgtacccgttcacaagctgccaacagaaatgctcccactccaaaattggaagtagaattagcatctactacttgtcccggtatagccttttcgccgataggctgtacataaccgattttcccatcaggttgaagggcaactgttatcaaatattgccatgctttttcaactatcggctgatattcgccggcattcaggaaaccgttattaattccccattgcagaccataagcaaagaaagctgttccgctggtttccggtcccggtgcatgttgcggatcaagcatactgcgtgtccaataaccttccggttgctgacaagcagcaacagatttagccaatgtacggaaacggtctatatattcctggcgatatttatccgttttaggcaagtctttcagcacctttgccagtccggctaatacccaaccgtcaccgcgtgcccaaaaatcttttttaccgttcacacttttatgcttcggatatacgtattttccatcccgataataaagtccggcttcttcgtcgtacataatactatcggcataaacgagatattcatgcaatttctccaggtaaagtggattcttggtgatattatacatctttgtcatcaccggcattaccatatacagtccatcggcccaccaccaataatcacggttaggtgtactcatctgatactccattacttcgcgggcacgggctattttttgtgtatctggctccaaattatataaatcagcataggtttgaaaacaaatctgataatctccgaaaagtacatagtcgtcactttctccatagctgtatttccagcaggttttatcgtccgacttagctcctttccattgattatgctcagcccactctttcgaatattccagatattccggtttctttgtcaagaaataaacttccatattcccggtatgataggcggcattatcccagaaggaccgaccatgttccggatgattcatctgccaatagccattcacttcatgaatcatctctatcacttctcccgaagaaccggttttcttttccgcacaacctgtacatattgtacttcccaaaaggaaagccgaaaaaagagttacatataaattcttcatatttttatttttttgtattcatatccatttccaacacatataccatttgaggttcaatctcggccatacgttcgccgtccccctgacgagtgtgttgtacaaagagatgtagtttccgttgtttcttccaaagctccgtatcatgtgaaggttcccaggcatccaccgagaaatctgttagatccgttatcgtccattgactgatagcaagatcagtagcgtgagctattgaaacacaacttccccgttcttcgtcacgaaagatgtagaaaacttcccctccccctacaacaatacgcggacgagcaataggaatcattttcgtaccgccgcctttcaacgtgaaaggtgttttccgatcggttacctgacgatgatgccataccttcccatcattccagacaatgcgatattgaggtatattactgtcagggtccctccaataagtagctatataaggatttcctccagcatcggcactcatactggtctgattgattaactcactattttggggtagccgacaagcgtattccgcattcgacaacttaatcggaagttcgtattgttctccgcttgatttataccatgtcacaccattatcaaatgaacgggcataacagatatcgtggtttgtctccacttgccaagtttcacgccatacccaggaaaggtgaatcgttccttgctcgtcaacatatagctgccaataagcattccgcttattttctccgtctattaagacatcttgaacacggctccacttatgttctttcaatgaataacggttcattaccaaattaccacgtccggaagaaccggaacggtaaacaaacaataaatctccaccggacaaagagtaaaattccggataagtaacattgccttcatctactccggtcattggcattttctctcccaattccaaagaagcgggagcaatgctccggcagtaattcagtttatgcccgtgatgatcaaacgaaatatgcaaatacccttctccatctattatcatactgatgatattatgagcatctttcacatttccacgatattgtgtacggtgcaatgtccacagttccgaattcagtttacgttttcccaatacaagataaccttcagcatcataatagctgatatactgctcatcaccgtgagttatcagggagttgttacggaataccgtagtattgaccgaagtacaactatatcccttccccacttcaaccaaatgttgagggtaacatagtacaggaataaacatgattccgcaaagtagtagcaatattcgcctcatgttcattcttcttttttatttatcaaaaatagaaaagtcccatttctcatgccagggaattgtaattttcccgtcttttatcaatacaggcaaccagacatagcgagaatcctccaaatctttctttttccaacggtcaaacatagcgatgtatgcatccttcttgccaataacaggctgaacgtatgtgctttgtgcatagaatgtcttgtccgcatccggccccgtgcaaggattaccgattgttttccacgtacccatgatagaatccgcaaccgcaatctccgctacattcggatcccagcctgtacaaccggaactcaacatatagtatttaccatcatatttaaagacagcaggagcttcacgggattctttcacaaaattacgtgtaaaacgtccgctcggtttcagatagtcgtcagtcagcaagctgatatacattgtagcattgttctccgaagagtagaattgataagcacggccatcatcatccacaaaaacggtctggtcgcgactcatcgcattgttagggcggaaacttccctgataaataaatggcccgacaggagaatcggaaacagcaactccggcacaagccttgctgtaatcggcactttccacatgtgcccacatcacaaatttacctgtctttttattataaaccacttttgggcgttccaagactttggacggatgcagatcgtgatccgggtcatttttaacagccggaagcacaataccttcaaatttccagttcagtaagtccttggaagagtagcaacctactccagtcacatccgtacgataacattcccacgtagcccattcgggcagaacggtttttcctttcttatattcaccataccaatagtaagtgccattgtgataaagaagcccgccaccatgagcattgatcggatttccatccgtatctttccatacttcgccgggaataaactccgtattctcctgagcctgtaccgccacaggtaataagcctacgcaaattacaaatagtaataatagtttagccatatatcaatctctgttagttagtttattttaatgaaaagcatgatctttcggaaagtcctttccttcccaagcctttttactggtccaatcttcagcaggagatgtccagaatgtatggtcggcgggaagtccgagcggcaggaaagcaagtgatgccatatatagactgccattgttcgtataccagtcggaaatattcggctgcttgccattgaatcctaaagttaaaaatcccttttcattgaagttacggtcatcaccaaacattcttttaataactgccgtcatagctgcacgaacttgtccatccggtaattccttgggcagccatcctctccatgccaataaagctaaaggctgcaaagttcctgtacgataagtgatagaacgaccgaaaaccggaagcgccccttccggagagataaaccgttccaaaatcattccgaaacgctgcatccgtttctttgcacggttatagtcacaatccggtgcgttccaaatcttacttttaccagcatttgtcatgatttccaaaggttctatatacatcggatgcaaaacaaaactattataatagtcaaaagcaaaacccggaccatcggagtaccaaccatcgcctacgtaccactcttctactttacgcaaagcggaaactatgcggtaagtatcacttggagcgcctgctttacgcaagaatgcttcgaccgtagcagaaaacaacaaccaatttgtgtaaggtggatctactcggcgaagttgtgtaaactcagctatataacgttgtttcgtaacactatctaaaggaatccataaagcatcatagcctcttataaaactctctgcaatataggctgcgtcaaccaacgtttgcccttcttttctccacaaaagataatcgggactttcggggtcaacagcctgtacgtaacttttcaaagcccattcacgcaattgttttcgttgaatgccttctgccgtatcatcgtccggcaaagaaatccaaggagctaacccagccattaatcgaccaaagcactccatataggttactttcttgtttcgcccatcccatgtaggactgacttctaccagcatattctgttgcagcttcccttcactcagattactaagtaccggagcagccattcggtacaacacccccgcccataattcacggtcagtcggttcctttacttgtttcttcttttttgccaataagtcctgtgacggaatcagcaagattgcgatcagcaatagtaatgtacaatgtttattcaatctcatgatattatttaggattttcgtacgcaaagatactttatactcataagagtaaggttcaattttatatcaaaaaagggatacaaaacaaccatttttcatacaaaagctgtaatatatgcgagtttaattaggtttccacctatccacccattctataaaaggtattcctttctcatcaaaccggacaggtagccaaatgtaacgagagtcagccaaactttccggcctccaactatctgccataaaaataaattgtttttcagtcccttgcaaagggagcacatacgtgctctgccctccgaaagttttatccgcattctctccgacacaaggatttggtagttgtttccattcccctaaaatcgaagtagcagtcaacaaacgagctttattaggttcccaacccgtacagccggaagttatcatccagtagattccgtcttttttaaaaatagcaggagcttcattatgtccacctggaaaaatacgtatatacttgcctgtatgactaagataatcatcagacaattctgcaatctgcaatgtcaaattgtcttccgaagaataaatatgataagcttttccatcatcatccacaaacaaagtcatatcacgggacatttgtcctccttccaaatctcttttcacaaacattcccttttcaactgcatcataccattccggagtccaccatttttcatattctgaaagattccatttgatccgtttctctttcttcgtcatattcaatggatagatactcgaatttacacgagccgaacgaataaaacaataaggtccagttggtgagtcactgacagcgacggcagcacgggccggtccatacccccggcctttcaattccagatgaaaccacattacgaattttccggtctgcttattataaataactttcgggcgttccatgatgcaccctttttcaatatcacttccttttgcttcagatatgggtaacaccactccttcatagttccagttcaacaaatcagtagatgaataacaattgatccctttttcggtcacaaagcccgaatcggggcgatgttcaccgaaccaataatattttccttcatgatacaaaacgcctccaccatgagcattaatcacatttccctccgtatctctccaaaccttaccagaaacaatttttttctctttctgataaacccgcacataatctatttcatacttcatcggcaaagcactctcatcaatcggaccaccattgataccaccaatagccaaattcaacaaaagatattgcggtttcgtaaaaggattcgtcctcttgccgatacttccgtttacagtatcctttaaaggaatctcattcaacagttcatcatccaaatagagtttgataacttcttcatcccaatccatccgccaaatgtgaaatttggaagcccattccggatctttctccgtaaaatggatatagggtgtggccttactattccatttagccccccattgcttgtccgtgccccacgcagcatttgccaaaatatgaggaactcctttgatttggtaatattccataatatctatctctccacatgaaggccactccatattactacccaatgtccagatagccggccatgcacctttcgccaccggtatgcgggcacgtacttcaaaacgcccatagagaaactccttttttccggcagtcgtcaccgatgaagaagtatattctataaattcccgttctttacgccaatcgttactaccgggtatgtaaagaggattctgacgattccgctctttccgagcttcgatgacaaggaagcctcctttacaaactgcattgtccggctgataccattgagcctcctcattgcggacataaccctgttcatagttccatacggaaggggataatctcccctccgtattaaactcatcgctccagaccagcctccaatcgtcattccgcgcagttgcgagcaaaggcaaggtcgtcagtaacagcaatataactgaataatttttcaaatataccattgcttaatcctatcgtttattcaaactgataaacacgaacataatccacatgatattcaagcgggaacttagacaagtccggttcacctccattggatcccaaagccagattcaaccagatacattgtccgaatccttcatcattctctttacccgcgttattaccttcatcaagatatggattacgatatgatcctctccaccaatcatccagtccaccagatccatttcctgtagtcgctttcaaatccttaatttcattcatcaattcgtcatccaaataaagtctcaaggtattctcgtcctcatccaggcaccagtccatacgccaaatatgatacttcttcccccaatctttatctttcgctataaattcagcaaccggcctgttataagactgccatttgccgttccaacgggtgtccgatccccaacaaacattggcgtgtacgctcggctttccatttaccagataatattcaagcaaatcaatttcgcctcccagcggccattcccagcaccaactgtcagtgcttccaccagtcgtccagatagccggccatgctcccattgccgtaggaatcttggctctgacgagcattcgtcctttccggaatctataatcttttgtaatcaggcagctcgaagtatactcagcatattcacgattctttttccagtcgctacttccagcttcataattcgtattttttacccgttcctcttttcctgtaattatcaatgccccgtctttacaaatagcattttctttctgataccattgcaattcctgattacgttggaagccttcttcccaacgccatacattccagtccggctctcccgttccattaaattcatcatgaaacttcaaaaccagtccttcttccgtcgtttccggtgcatcattgggatcaggcacatattccggtcctttttcatcttcagccgattctacataggtcacattgaaaagtaacatcaacgtatttgttttagaattaattccataagaggatgagccctcaatcgctaacggaagtacatacaacaaattcctctccgcttcctggcaagctgcaaccagttcactagaatagactgttactgatacggcatccgattttgtttcaccagcttgtagcgttaatgtctgagaagataaatgataataggactctggaagtaattccgcaccgtcatattttgcataaatgcctccttccgccaccttagctagcactttattcaatgtatctttattcacaaccaagctaactttagcttcttgtccggctgtgcgtccttgataaagagacaagctcaacttataagtaaagtttttaacaggcgtttcatcctcactttgccgtaaatccgtagtcacgttacattccgcaccatcccacacttcacgggcttgcgtcagattcaacaaattcagatctagttgaccttcataactaaaatctttatcatcgtcacagccatatactccaccgatgagggtggccgccatacaggcgaccatccatattttattcattttcatcataagtctcattttaaattaatccaaaggaactgtttccgggtcatacttttcaatatccgcatcaaaaaaggcaatctcccctatatgaaaatatttcttgttcaacgaacttgtcaatacattgaaacggaaatatttaaacttcttacccggcattacaaaatcagaagcgtattttgtctgacgtgttgtgggcaatccactcaaagtagaaacagtttcccaatgttcaccatccgtactaatctgtaattccgcagaagtagggaatccgtccgtgttacctgtatcccgcgtataatactcgaatgcaaaattttcatgttcttcctttaaatcgatctgtatataatgcggcaggtcaacttgcggagaatgccagttggtgtgaaaaaaagagggatccgccgttttaccatctatcaaacggtcaaaatacccttcagacgcgtccggataattacaagataattggtctactatcagactgacctgtgtacgggatttctccgtatacgatgccggcatcgctcccgaccgtgctttcaattcctgaactgctcctgcttcatgagccgcattaaaggtctgcaaataaaaagtatagtctccgaaacgagcacgagtattttctatcaacatttccgttgttcctttagaagcaatcttacagatatttttcttttgtaaagggtcataatagcgaatctgcatataagcgtaatctccttccggtgctttccaagtcagtttaatctgtcccggcaaagcctccgacacgaccgtagaaagttcaacggcagcaggacttcctccccccgatgtttcaaattcttcaaaattcttatcacagccaaccagtcctaaaagcgcaaaggctgcaatcatatatttaacattcaacttcatagcttttatcttttatcattaataaaacttaccaacccggattctggctcagattcggattcttacgcatttccgaagccggaatcggaaagaaatacattttatcatcccaaaccaatgatttatttgtccgctcatagaggaagtttccatcctctttttgggtaatctgcatacgcccgattttagtgaagccaccttctttccaacggcgaacatcccagaaacgatgttgttcaaaagccaattctaccattctttcttttttatatcgttcccaaaattcagtgttagaaatattatccgggaaatccggcatttgcacatccgaacgctgacgcaccttattgattgcggcacaagcagacatcctgaattcgttgtcagtagcaccggccgctcccaaataacggtagattgcctctgcataattcagataaaattctcccaaacggaaaacaacccagttatgccgtttgcctccactgccactctccgcactgatgtcggtagacgcatccaaatacttcttcaaataataaccggtcggtgttgcataaggaagaggcagaccattcttaccgccaataaatgtttccaacggattcggattcgtattcggccatttgtcaccattacatgcgatagtcatgccgaaacgcggatctttatctccattatccttagattcgtaagcatccaccaatgtttgtgtcgggcaattaccggaactggcattctccataccaaccgggaaattagtatattccggactacttgtatctccaatacgacgaacgaaaatcatttcagaagcttgataattatccgtaccccaaatatccgtatattttccaagccggataccgttagccgtacaataatcaataacagctttattggccacagcagcttcacgccataaattccggtcttcaccaccactgaacagtttgcttgctctatataatgcggcacgggcttttaatgccaaagccgttccctgcgtgacacgaccggcctccgggttggaaccacccgcagcatcattatccaaagcggaataagaaacgggcaactcaggcgccacttcctcacattcactaataataaaatcaaagacttccgacgccggagtacgtgaaagagaattagcttctttctctgtcaacacattcaccgtaaaaggcacatccccatacgcacgcaccaacaagaaatagtaatacgcacgtagcagacgaacttcatactgataacgattaaaccggttcatctgagcctcataatcctgcgcatagcgtaaatcataaaaatcaaggtctttactttcttccagaaagtaattagcggcacgaatacccgaataatacccccacagagatttagggttcaatgcactccaagcaccatttgtatagtcgagaacagatgaataagtaacagccatttctgcttcatcacaagcggaagccaatgactgatagcttggcaagtcggaatccagataactatagatattattcacaaatcctgccgtacgggaaaaatccgaaaagacataatccttgtcgtatgacgtgtattcatgataatccatcttatcgttgcaagctgacaccaccgctatacaagctattcctaggcatatatttttcaatttcatagtttctttctttttatagcgttaaacgttaaaatcctactgacaaaccaacatgaatagatcgggtagcaggataagagttattcatcgcttccggatccaattggtcaatactatcgaagcaaagtaaatcaacccctcttacatatactttcgcattctttacccaaaacctgttcaaccaggatgaaggaagcttgtagtacacctcacaattacgcaacttcaaaaaagaacgatctgccaaccataaagagcttgtctgcagattgttgtcaacagtttccgtcgtcaaccttgggaaacgagcgttcggagtttccggtgtccaacgattccggtaaacataattagaaattgtcgtattatccaccaatggatgatagtaagttcccgacaagattgccgtataatttcccactccttggaattgtgcactaaaacctaatcccttccattccaaaccaagactgaacgaataataaatctcaggacatgtactattgtatcccatagctactctatcatccgaattaattactttatcaccattcatgtccttgtatttaatatctccggcctttaccggtccaaactgctgtggcaagctattatctatatctgcctgatctacaaaatatccaatagcctgcaatccaaagatttgtcctaccggattgcccgtagagcgcgtatagtcgtaagctgccggttcttctagcatttctataattttacttcgattgtaagtgaacgttcctcctagatttaattccacattacccatcttcttatagtaattggcgccgatttccgtgccccaactatctacgatacccgcatttacataagaaccggatgcacccaacaccgccgagttctgtccgtctgaactgacccaaatatcagaacgtctttcataaaagccatccactgtcaaagtcaatcccttgaacaaggtagcatccacacccgcattatacttataagctttttctgtggttccgttaacagatgccagacgaccttcatgccagcctccgtcaccaccgaaattattatttatcggatagccattaccgccacctaccgtctcattccaatagccgttaccgggaatattatccgtattcaacataccgaaggaagcccgcagtttcaggaaatccaccacattctggctttgcataaacttctcattagaaataagccatgccagcccaactgtaggagatacattccagcgatgatcgggcgccaataagttggaggcagaagccatcaatgtaaaatctgcaaaataacgattcttaaagccataatgagtataccaacccgcattctgacggtagaacgtattattgattcctttagcattatcatatttataggtataaagcaacatggaatacagactgtgtacaccaaactgacgttgccaatcgacattcatttggaagttaaaggcgcgatattgccagtcaagtttgctgtcacccgacatttccgtatcttttcctcccgttatttcctcaccagctatcggcaatccgttttcccaggaagcgaccgatgccataccatatttatatccttttgtgtgattctcccagtaagaagcaagattgtcatatcctatacggacagaagctcctaaccccttggttaaagaagacaaatcctgccgtaaagacatatcagcatataatccacgagtatgtccttttgagtatgcgcgcccttcagtcaacgctaccggattccagttctcaccccaagtagtatttcctccccacaaaccactttccgtacggatagggaaagccgctgaaggtaattgatacagtttgcttatcaaattatcgctgcccatacccggacgactgaattcattcaaaatccccatgatattggcctgcatctttgttttcggtgacaaatcaatatccagattggtacggaagttagcttttgaatacttttcctgagtggaatagtcagcattcgtatcgaagtttttgataaatccacggttattctgcaaattcatcattgtataataacgcatcttggtagatccgccgcgaaaacttaatgttgcgatatctgacgccccacgatcacgaaaaacttcttcccaccagtttacattcggataaagataaggagaagtgccattcttaaacgcattcaattcattttgcgaatatcgcacctgcttgccatcatttgtcaatgcttcatttaaggcagaagcatacgtataggcatccgccaattccggcttgcgcgtcatataattgaaagcatggtcataagaaaaattaatctcacgagtatcgtatttaccacgttttgtcacaatattgactacgccattcactcccctatagccatagagagccaacgcggccgcatcacgaagtacactaacagattccacttcttccggagtaatatattttaaagcctgccagttattatcccgttcaagtccgtccacgaccaacaagatgccattattaccattcagtgtcttcaggccgcgaatatacatcgacggcatctgctcccataccacaccggtactttgcatggtagtcagtcccagcacattgccatataatgaatttccgattgaaaaagccgagcttttatctatattctctgcatatacagtagatacggcaccagtagactccgcattcgtttgctgcaatccaaatccgtaatttactttctctgaagagtaatccatgacaaccgtcaattccgaaccgttttctattttcaccaccttcattgcatcatcaccagtctgtactttcaaacggcttcctttcacagcagtgatttcaaaacgtccatttttatctgtagccacccgcaacaatgggttctcttcaaccgaaaccaaggctcccgctaccggcttccctttttcatcaagaactcttccggttacattatcttcactttgtgcccagccgttcaaggtgacgcaagcgaatatcgctaaagctagtatcttatattttttcattttattctatgattaatcgtagttattccacattaattccaaccaggattttgagtcaatccgtatttcttgttcacctctgatggtgggaatgctgacaaataccacttcggactaaaattactccaccatgcacgggaaggattcactagcggaaacgcttcatgagtgaatttcgttggtttaggataaatactgctgtttccggtacttccggaccaaggcgtatttcctcccccatcatttctataaatcttcaatccatggagttgttttctaaaaagatcttctcttttatatcgtgtcatgtcaaacagacgtacatcttccaagcctaattcgcaagcacgttctctgaggatctcttccagcaaggcatcagcgtcagtcgtcagattcttgccgggattgcaaaccgccaagtctcctaaaccaacacgggcacgtactttatttacttgctcaatagcacctggcagatcattcttcgatttaagcaaagcctccgcataaatcagatacatttctgccagacgcagatatggccattgcagatatttatctttcagagaattgacaccttccttatagaacttgtaacatccgaatccggtagcatatttgcctgtctctttctctgtatcattaatattgtcacgtcctccaatccataattcggcagcatgatctccaaactgtgttccattcaccagcatcgtttcatacaaccgtgggtcacgaatcggtttgttgtaatcattatccgtataaaacaggtctgtagcagtattcaactggaaaggttcgccattactcattggaaacatctccataaattccagtgtgggggtcaatccacccgtaataactgtaccttttccgctattgacaaaaatatactgccattcatcccatgaattaaatttaccgaaacgggaaatatgcgtagaaatcaacagttctttattattctcacgggtaaaataggccttattatacgcatctctgtaaccttttgccgtagcttccgttgcctgtgtcagttcataataccctcttgattgaagttctgtaaaaaaatcaacacaagcctgtaaacactggtcccataactccggtttgtaagcaccataccacacctgatgattagtcacagcatcttgcggcggctccgtacaataggggacattgtcattaaacaatgggctggctgcaaacaaaagaatcttacacttgagccccatagcagctgctttggtaaagcgtccttgccaattcgtgtcatccgtacctaagtcccacggaagttgaggagtagcagcagcctcatctaaaagattaatcatgtaattcaccgtttcttccaccgtagcgcgaggcaattcataagaaggctgcacgtcataggtttcctttattaacggaagccctccaaagtggcgaaacaaatcaaaataacgagatgctacaatcactttagcttctgccgccaaacgttttttctccgcatcttccatatccggaacccgctctacattctccacaaaaagtaatgcagcacgaatcgcctcccaacaattctctttagtataaccaaagcgcgtatcatcgctactatcctcatcacctgccttataagagcctgaatagtatttccggttaattccattccaatccgtgtggctatgccagcaatcggacatcatttcaaagattcctgtgttcattttcccctccaccgtattccaatatacagggagcgcgtaataaagtttactataagtattccacaggaaagcacgagcgtacgtagcttttccgaagattgtatcttgcgttaccgctacccccggagccttttctaaaaagctatctccaaatttcacttgatcgacacaagaagaggaaaacaaagctactcctgccaatgtcgctataaaccatttacttaaatgtttcatcatattattcataaagtattagaatccaagtttcaatccaatattaaatacacgtgtcaaaggataattagggcgggagctctgacgagattccgggtctccccatttgaatccggtaatagtaatcaaattatatccatttacatacaaccggcaattatccatcttcagtttcttcatgaaagggaaattgaaattataacctatttccacacttttcagacgcaaatagctggcattaatcaaatacaagtcagaccctgcataattattggaagcatgcaaactagaagtacgcgggaatttagcagtgaatgtatcagccgatgaacgccacgttgtatcatactgataaagcaacaatcccttttcatttgtatcacccaacggacgtctgaattcgtctaacatccgatccacattccaagctcctgtccattgcatggaaaaatcaaaattcttccaactgaatccggtattcaatccggcagtgtattccggcatatcggtataccctatatcgcgcgtagcatcattggaatttatttcaccatcggcattcaagtccacataaacgcaatcacccggcaccaatgtaataccatgattagctatcggacgtccaaactcctcttgataacgcatatctgccgtttcatcatagaacccccaaaacttatacatcgaacgggaacctattctacgtccagtctcatacatccaaggctcattttgatctacctcattcttatagacaattttattccttgagaaagaaatattaaagtttgcccaatatctgaaatcatttttcagagtttcgttccatttcaactgtacttcaaatcctctattcaatgtctccccaacgttaacagaaggaagtgacatacctagaattgccggcaaataatcgggtttagataaaatatcactacgatcttccctaaagtaatctaaagaaaccgtcaaacgctctgccaggaaggtggcatccactccataattctgctttactgcagtttcccacttggcatccggattagaacggctgacttcactggcaccgggcattttatttccaacattctgcccgaaataatatcctccatcaccatattgataagaatcaggcaaatataagaatcgttgtgatacatcattacccaccattcctacagaagcacgtagttttaaataattcactacacttttaatcggttggaagaaagattcctcacttacaacccagcccaatgaacctgccgggaagaaaccataccgatttcctggacgaaagttttccgaaccattataacccgcattaaactctgccatataacgggttttccaatcataagtcacacgtcctaccaaacctacatatccggtaggaatgtcagagtactctgacggatagtatttctttgattgattatagagtaacaatgctgtcacattatgatccccaaacttacgggcataattcaatgccagttccatataccagttgcgcgccttagaaaaaccgttatcaggttccccataacttaattgagagtcagtcccatatttacgaagagaaatagatccatcagcatttgcaacaggtgtataataagccttggatgaactcgctttcttagtattagcatattctgaattataagcacctttcagttttacggacaatccttttgtgataaaatccaacttttgattcaatgcaaggtctacattcaacacatttgttgtctttgtctgaaagccttttccataataagagctcaatccatccactcccgtaaaaggaagaacttcagaattagatacaacacgttcaccgtttacaatacctgcacccgcaaaaggaaccgcccaataaagtttgcggaacaattgattctgatcttcacctgattccggagtacgctttgtctctatacgaccgccaatattgactgacagtaaggttgttttcgttacatcaaaatccaaattagcacgataattgtatcgtttgtaatcaaagttaaaatcatctgtcgcattaaactgcttgaacataccgccttgcgtgaacaaaccggcagaaacaaaatatttcatattactagttccaccagatatattcacattatgctgagactgaaaagcagccttattcatacaataatcaatccaattaatatccggatacatcaacggattagaatgattgcggaatgtttccaactgttcatcgctaaaagtagccaccccaccatcatttactttcatcatattataataggaagcatactggtaagaattagcgaactccagatccttcgttcgcacattgacaccagccgatgtagagaaagaaaccttagccttaccttctgcaccacgtttggttgtaatcaagataacaccattggcaccacgtacaccaaatacagccgtagctgaagcgtctttcaacacagtcacgctctcaatttcattcggatcaatctgagaaaagtcacgttctacaccatcaacctgaatcagcggtttcgcattgttccatgtagcgacaccacgcacataaatatctgccgcatccgctcccggctcaccggaatattgtacagaagaaataccggtgatttgcccggataatacattagataaagatcctgccggagtcttcaacagatcatcccccttcatagatgaaatagctcctgtgatagatacttttttctgtacaccataagctactacttgcacttcacccagtgtctgtgcgtcttcttctaatactatatttagactaacacctttctttgcggttacctctttatccttgtaaccaataaaactaattttgattttcgcacttgcaccggatacattgattgaaaacttaccctcaaaatcggtaatggttccttgtgtcgttcctacaacctttacattggccccaatcaccggttcaccataggcatccttcactacacctgtgattcttgtagaattctgttgtactacctccggcatgggagtatcgtcaccatagccgttcagaggaatcaaaagaaataaaaacaaagggaatacgattgggagtaaccgttttttcccgacttgtcttccatggaaggtctttcgcttttccattcagtataaaattaagattaaacattaaataaacaaatctcatgatccttaggaatcacaacgcaaagatagaaacctcccctcctaccaacctccaaagatgctttttagaggtagaattttagacattcgccttttttgaatgataattcgacataaaaaagagcatagaaaaccttccctatacaaagtacaaggattaagcagaacaagataatataaaatagaaaggtaaaccagaacagatttctactcgtgctctttttcaactacaaattggtcgaggtattcagaaggtaaaactccaaactctttcttgaagcaagcactgaaatattttggatcattaaatccgaccgcataagccaattcggagatacgtatactatttcctttttcctccataatccggcaagccgatttcaaacggacgttccgaataaaggcagaggtgttcagcccagtcaaagactttaacttcttatataaagtagatttactagttttcatttcatccgcaaactggggttggtcaaattcacaatcttccaaatgattattcacacagtcaatggctcgttgcataaaatcctcatccagactggtataattcaaatcttttaattcaaaaaccagctgtttcttaaattcgtgcgccatacgctccttatatttcagcaaattacgaatacgtgcatgcaatacagccaaattgaaaggtttgcttataaaagcatccgcccctacctcatacgcttccgccctgtcctcttccttatttttagcagtcaatagaatcacaggaatatgactgatttccagtttccccttcacatatttacaaaactccattccgtccatctccggcatcatcacatcagacacaatcaaatcaatgtcttcattctccaacactgcaatgccttcttttccattttcagcagtaaaaacattgtattcatgcctcaagagtttcgtcattaaatgcaatagttcctcattatcttctattactaatatagaatttgccttttcggccgtaactaatatttcatcagactgtttctcatccatttcttcttcataagctactaatttctgaaccggtaagattacttcatcatcaatttgttcttccctgaaataagaacggtcaataggaaggcggataataaactctgttccctgtccttcttcactttccacagtaatagttccttcatgcaactctaccaaatctttagttaatgaaagcccgattcctgtaccaatggtattaaatttccggtaatcaccctcgtagaaacgacggaaaagtgtcttttgtttctctttcgatatccctttcccattgtcctttacacgtaaaagcacccaatctttattttccgcataggataaagttacctgaataaaaccatcttcttttgtatattttgcagcgttagacagcagattataaagaatcttatccaatttatccgtatcaaaataaccaatgattgattccggatcacacaacacagagaaatgtatcttttgtttcttaatcaaaggctgaaaactttccgccccatttttcacaaaggaagcgatatctcccggagatacacgaagcctcagattgccggtttccgcttttcgaaattcaaggatttgttgtaataaacgtatcaaccgacgaatattactattcatcaccacatacaagtctgtatgctttggagcttgtattttaagctcatctacggtagctgaaataattgtcaacggagtcagcaattcatgggtaatatttgtgaagaactgcaacttggcatggttcaactcctccgctttcgccttctccaattcacgcaaacggagttcattccgtagtaaaatacgatttttcgttattctgtatagtccaatgacagttccaatgacaatcaataaatataaaatatatgcccaccaggttgcccaaaatggaggaagcacaacaaccgtcatttcccgaatatatccattccaaataccattctcatttgtcactttcaatttaaatttatacgtcccgcttttcaaattattatagtaagcaaaacgacgctcggcgcttgtataaatccaatccttatcaaatccctctaactgataagcgtatcggttaagttcgggattcttatatgtcagtgccgcaaactctatattgaagttattatatttataaggtaactctattttctgagtaaaagcaggagttaatgaagatatttcccgttgcacatccaaaggtaatgtacttatggaacgattgaatatctttatatccgtaattgcaaactgaacatctccttgaatatcttccatatcctcaggaataaagctattatagcctttataaccaccaaaaaacaattctccctcccgactgcaagcagattgagcgataaagaaatttccttgtagcccatcagcttctgtgtacacacgaacaaccggttcgttacttttcatttgagcacccagttttaccaagccgacattcgtccccaaccacaaatttccatttttatcttcttcgatacttccgaccatatctccgggaatattatattcctgatttttctcttcaaaccggtcattctgtctattatacagataaattcctcccccttcggtgccaacccataaacgtcccgatttatctatgtgcaaacacaaaacattattggtcagcattcttttattataaaaactataattataatatttcaaggtagacggatttcggatgtcaccttcaatatgaatcagaccataattcgaagtggctatccacatactattatcactatcggcaattatatcccttacataaaaccaattcaattgagcaccatctacaaaactcatattttcgaataaaaagctatttccatccgccaactgtacacctaaacttccacgtgtacctacccaacaattagcatatttgtcttcataaagtgcagaaacacaagaagaacctaagaatttacaattttccggagtcaggtttcttaccctttgtcctttgtggtaagcaaatattccaccatcatacgttccaaaccaaatttctccactaccctttctctggacgacagaaaaaactgtgggaatagtcattccggtaaattccggcatttgtgaatgcgacttcaattttcctgttgcgtattccagacaagctaatccataggtaccgatccccatccaaatattattgtcagaatctgtaaacaaagaccgtacggaagtggtcggaatatcatcatcggcaaaattcaaactatgaaaggtaaacatagactgatgtgtatctgcattcaggactcctcctccaatagaaccaagccacatcataccggagttatcacgtataatggaatttatttcatcacaagaaatataatgagaagagccgcgggatttataattaataaagtgtccgggaatatcattgctcataatactcaacccgctacgtgttcctacccacaaagtattggtattcaagtcttcagatatatcatatacaatatcatcggataaactaatattgtcacctaatttatgccgatagttcacgtaagatacccgctgcaggtctttcggattattgagtttaaaaagtccgcaattccaactacctacccatatatttttattggtatcttcataaataacatgagcagaattacgttcattcaattgaggataggcataaaacttgccggtagaagggacatacctatataatcccgacgaccatgtaccaatccataaatcaccttccgagtcttcgaataaagatttgatagcagtataatccaggactccatcagtctgttcccgatgataaactacaaatgaatctttttcggcaatatatttgcacagcccggaatccgttcccagccatacagaatgatcccgagtaaccagcaaacaagatacgacattattaggaatctcaggagccagaatttttctgatctcccctgtttttttattaagaatattcaagccttcctgagtgccaatccacaagttgtgtttataatcatccaccaaacaaagtatgttgttattagtcaataaaccgggggcgtaaagatttgatttatataacgttgcctcatagccatcatattgataaaacccgtaacggctagccaaccagataaagccatctttatcctgataaactttctggatttcatctgtaggcaaattattaagagcaggcagtttcttaaaattcaaatgtgaaacaatatcaccttcgaatgcgaaaagtaaagttgaaaataaggcacaaaaaatagaggcataaaaccttctattgatacaagaatattgattgttttccataatacaataattgtaatatttgcaaagataaaaaagttttatgtatatataaggagaattatcattctttttaatcgattttacacgcaaaaacgcccttttctgtaattgaatgatatataaccgttatcgaaacatatttgctccaaagatttgattaaaagaattatctttgaaccctgaaacaaatacctcaagtcatgaaacatttatttatcaggtttcttttattttacctgttttttattggaataagcccaataaacgcacaacacagaaagtctgctaatcctattttatccggctttcatgccgatccggagatcttatactcccggcagaccaaatgttattatatctatcctaccagtgacggtttccccggttggggtggaagttattttaaggtcttctcttcaaggaatttgaaggaatggaaagaagaaagagtcattttagatatgaaaaaagatgtctcttgggcaaacggaaatgcttgggccccctgtattgaagaaaaggaaatagacgggaaatataaatactttttttattacagtgcaaattctgtcactaataaaggcaagcaaataggagtagccacggcaaactcaccgaccggtccgttcaccgattccggaaaaccgattatcacttcctcacctgtcggacaagggcaacaaattgatgtggatgtatttactgatcccacatcaggcaaaagttatctctactgggggaacggctatatggcaggggccgaactcaataatgatatgctgtctgtcaaagaagaaacaatcacggtgatgactcccaaaggcggaactctgcaaacatatgctttccgagaagctccctatgtattcttcagaaaaggagtttattatttcctatggtccgttgatgacacgggatcacccaattatcatgtagcttatgggaccggcaattctccattaggccccattcaggttgccaaagagccgattattctcatacaatctcctaaagatgaaatttacggtccggcacattgttcggttcttcaagttcctgacaaaaaggacagttggtttatcgtatatcatcgtattaataaggaatatctgaaacatggaccgggttggcaccgtgaagtctgtatagaccggttggaatttaataaagacgggacaatcaagcaagtaattcccacaccctaatcccattatcaagtttcattagaaaatgataaatcaggatcaggtaaagtcagtttccttatgggaaactctagtttccaaggctcgaaactagagtttcagagtcttgaaaccaatcgtttcactaagggaaacactttgtttctcggtgagaaacagaatcgtttgccttagctactttttcgcctgtagactctatctaaattgaaggtgataggtgatagattaggtgataggttagcgacaacctatcaccattctgaatgtacgatgaataagcagtttcagaagggcggtgataggttgaaagaggattcttgttttttacataggaagaggattgcgaatatacagggtccggcatttattatgtttcttctatccgatcagaaagcacaattcctccttgaggataaacttctaattgcacccttcccttttcttttaccttcaaaggtataagctgaggttcccctctcttatcatctttataaagagacactgtttttccggcaaacatatccaaatcaaacttcaattttaacggttcacttccggcatttacagctgctacataccaagtatctccatgacgacgggctaaaactatgtattttcccggataaccttcaatgaaacgtgtttcatcccaagtgacaggaacctgtttcataaaatccatgcaaaccggagaaacatcattcagattattcggagcaagagcaaagttctgaacgggattttggaatagtatggctgtcgccaactggaatatgtcagtagtacgacgagtggtgcctccgtcattgttacgattcagacgcttgttcaggaagcagccgccaaactccatacagcctactgcgttgcgaatgaacggatgcaggcaagtattgaatgcttcttcatcacagaaatgctggctgaacaccatattctcggaagccaacacagcttcgctgcctacataattaggatacatacgttcccagccgcgaggtaaggtgcaaccatggaagattaccattagcccgtggtcatccgcatcgctcaggatctcttcatacaggcgcatcgtctcctgtttgtcgccaccgaaaaaatcgactttgattccttttacacccaggctttgcagccatttcatttcacgtttgcggatgattgcattgtccatgtgattaatcgggccttgttcaatgtcattccaatagccggaggaactgtaccacaaaaataattccactcctttgccacgtgcgtagtcaatcagagatttcatacgttcacggccgatattagtatcccaccagttatctatcagtgcatattcatatcccatagcggcggcaaaatcaatgtaacgcatctgatcgtcatagttgatactgccgtcctgccaaagaatccaactccatgtgccacgcccgaaacggtagtcatgcttcgtctcataaagagggtttacgacatcccaaggaacagtggtttccacaatcggtttcaacgtttcgccgacggtaatcgtacgccaaggggtagcaccgggtaatgcaaatgccggagcaaccgttccgttgccattattctcttcgggcatcgggaacgccactgtgtacagattgccttcactgacatcgctcaaacgggaaccgcaatagcgactgtctactcctgtttcgctcaccagcacccaaccggcgtcaccgatacggaacagacaagggaaagtatatccatgaccgtactgtgaacgttcgctcatcggtgcatccgctttatattcttcttcataactcggttttgtgcgcttccatccgatcatcgcatcgctctgcggacacaggaaagttgtagtctgccgcggaaaacggaaaccggtctgttcatgattgacggtaacgctgcctttccctccctgtcgcggtaaagtataacggaaagcgacatcattattacttacgcggaaaacgattcctatcttctgtccctgcgcattctccaaattacaagtcagttcattcgcacgataatgtatttgggaagtcttaatacgtgtctgatgatagacagtatctatcacctctacggaatgtcccgacaacttcagggctttcgtaaagtcgcctatattcgtgctgattcccaaaggagatttttccagcattgctttcccgttgtaggtaacggaatagcagggagtttcttcgtcctgcacaaatacaactaattgcagtttctcatccgggcctttcactactacatcttgtgctgcaaggctattcaggctgagagatatcgccaatatgcttacaatgtttttcatatatactaattccagcttattatctttagaaaattcacatctacccccagatacgttctttttcacttccagcaacttctacttcgttttcagacgaatcaccgtaaatgaataggcgggtagttgctgcttgaagtttgctccgacttcgatagtgtcggtcacgggaagtggagttgattccggtgcacctgccaatactgtccttacagcagaaggttgaacactgcctatgccaggtaattgtatttctgtctccacactgacaggcaataagttgaccagtttcacaatcacatctccggtcttgctatcgcggacaatggaggaaccgatacgaagcttcacccggttgtcctgattatcaagaattatctgtgaggggatataatggctacctgcattctgcccatataacttttgaacgtaatatccggtagtcggtttcacttcacggttattgaagtaaatcaagtccgggctccattgggtatgcttttcttttgccagcaaaggagcataagaagtcatgtgtactacgtctccattacgttccaaggcggtcaggtaaagagcttcagtcaatgctgtttccatattggctttccgcccgggaatatgagtagcatattcgcctagataaactttagtcttttttgaacggtcgtatttatcgtagaagtcctgattatgcaaaaaccaccccggagactgataataatgttcgtctaccataggaatgcctaatttatccgccaacttccaaccttcgacgtaatcggtaccttcattgaaaggaccaactgtacctacaacgattatttcagggtatttctccttaatcgcattgaaaatcatcgtaaagcgttcctcgaaaatatcagtgataagatcctcattaccgatacctatatacttcagattgaaaggcttcggatgtccggattcggcacgtacctttccccattttgtctttcgggcgtcaccattcgcccattctatcaaatccagaatatcctgaatataagcaggcatttcactcatcgggataccgccttgttgtccgcctctcaaatcaccgtgacaagcagagttctgacaaggcacaccggcagcaagcaccggaagcggttccgcacctatatcctcgcaaaactggaaatattcataataacccagtcccatgctctgatgatacccccaaaggttgcgggcagatttacgggcttccaacgggccaatcgtatttttccattgatagatattcttcaaaccgtctccatgagctacacaaccaccggggaaacggacaaagcgaggatgtatatcggctagtgtctgcgccaaatcggcacgcaggccattctttctacctttgaatgtattctgtggaaaaagagaaatcatatccaattcgacttctcccactgattgcagttgaagttccagatgcgtatcggcagctgtttttgcagtcaatacagttttataagttttccatgaacgggaagaaacggttatcgatgcctctccctgcactgtgccattggaatctatcaaacgtacctgcaatttgttagatttatgtccggccggaatacgtccaaacaaagagaaatcatacttttcgccggcttgaagggctatcccatcaaaccctgcatttgtcagtacagctcccggctgttgtatattcaacacagcgtaatgaggattattcggatgaacgggatcggaggtatttattgtgaatgtggcattatctccctccaacttccaggaatgcgtactgttccaattcttatctccctcacggtcggacggatcatattcaaaatccctgttttgaatcagttctgcgtataagccaccatcagcagaatagttaatatcttcgaagaatattcccaacagcaaattactgatttcttttgtttcctccggttgtaccgtaatcgtcgcttttacaggtttcagcccggcaaaacgctctttatcttgtaccggacgttctgcatgcaaaaaattccggtattggttcctttcatagtgtttcgtcaacttgtccaccagtgtccaagatacccgattaatatttccggtctgttcctgcccgtcaatagttacctttactcttgttccctcaaaatcagaggttacctgaggatatttctgactttcccaataaaccaagtctttcgattttgcctgcccgtatccgtcatgtgtattcaacttccatgtgcagagccatccgccgtcaggaagttgcttcaagaacggatcgagcattttcttctgcgatccccaacggctataatcacaacggaggtatccggttccctgtcctactgcgaaccaatgcttctgatccatgctccaggcaaaacgaagtccgctgcgtccgtcatcccgggaagttgcatacgaaaatagaaaaacggaatccggagtgttcgccgcctctccgattgcagctaaagtaacctgttggaacgacaaaaacaagacaattactagcaggaataattttttcatggcataagtatcattaagattatcaatcataaagacaaactcttcactgttatgagaagcacatattgagtgtaaaatcaccaattattattcaaaggcatatcaagaaacaagcgaacaagaacaaattgtacgcctttcctgtcttatgtattattttccagtcttaaggcagcaatttgctccggcttatcataagccggttggtttgccgtagaccttatacaaacgtttcaattctttttcagtgataggtatcacagttccgtgacgagggtgaaagtccatactgacagcatgatctatgactttaaaattttccaggtcggtactttccgtaaactggtatttgcctttcatatatacatcgtacatcaggatatacttgtccgaacctattagcggaaagatactcgaaccttctaccgcttctttcgtctgctgtttgtattcccctgattccgtccattgtccggaagtcagggagacggtagtcgctttcttgatgccgtttccatctccttctgtcttataaaacagatgatacagtccatctttatagatgatatctccgtcgatacatgacttgccatttttaggaagaaacaagggcttcggctcaccttcaaggtcggtaaagtctttattcgcatacgcataataaatgatatctgcgccattgccatgcttcattgaccaatataccatatactttccggcttctttgtcataaacggtctgtggagcccatacacgtttcaggttttcctgggcaggatatgtcttttgaatattgacaatattggaagtccagtgcaccaggtccttcgatttcaacagcaccatggcacggttggaatcccaaccgtttccggacaccatgtcggtgacaaccatatagaatgttttaccgttctcacaacgcaagatatgaggatcacgtaccccacccgtagaactaatcacacgggaatcaagtacaggttggttaccattcagggctttataattatatccgtcgaggctgactgccatgcggatcgcttcttcgctcatccggttcccggtaaagtagacaaacaagtaagcggattgctggcagtaaccggtcagcactcctataaaaaggagtgctaaaagggtagtatatttcttcatattcatttaatattcagcacttggctgggagtaatcaatacttgaaatcggctggtttcacatagacacgatattctttaatcatacccggataattcttttcggcacggggcagataacggaagcctgttacagtctccaccttactcaaatcaatcaccagttggtgaggatacgccacattatctactgtcatccagaaagtagattcctgtaaatcgaaaatcttatcggctgtacggttaccgctgcgtgtttcctcactatcggcataacgaatcttccaatgttctcgggataccggtttgccgtccgcacccagaacatcaaattctgcaatagcagcaatattgtcatttgcctgtggtgaaagagcttcgagacaaaaataacgtcctttcaccggagtagtaaaacgtacttcctgccagccgttgcccggagtaaatgcaccttcgtgtgcaaccttctcgcctgtcagtttcagtttctctccctctttgcgatgagtttccggtgctttttcacgaagcacatccaagaggggtttcttcaggcctttgatagaagctttgacgggacctttcaagtcaagaacaagaatctcattctcaccttctttcagccaacatcccggcataaagagagtctgctgaggaccaatctcccagaaacgtcccatagcatgaccgttcacccataccataccttttccccaagtactcatatcaaggaaagtatcaccgactttgtccagtttaaaggtcgttttatagtaagcaggcatagctggtaatattttcgtatcctgatagttcttattcttaataaaggagtaatctacagggaagctgtacaccgtccagtttttcagttcttttgaccggtcgccggaaacaagttccaccttttccgtgattcccttccggtcgtgaatggacttatcaaagtttacacgtcccatagcctctaccagaatatccagttgcgtccctttcttcaaagcaggcaacaccgtcgtgaactcacctttacgacgatccaaacgtgtcaacagtttaccgtcagcatagatttgtgcccaatcatgcacttcggtaatcttcagagtcgttccggattttacagcttcgggcaatgtcgtccgatacagaattgttccccaaccttggttaaattgttccataggttgaatatccaccgtttgttttgcttccggcagattagagaaaagaggagctatttttgtaaaatgaaactcaggaatttcaatgaccggcaatgcggcaggtatttcaggcaacgcttcaccggcaggaagatatgttttcaataaatcgcgaagcaggaaatacttctctgtcgtccaaccggcttcactgataggagcgtcataatcataggaactgcacatggcagaataagcaggattattagcacctccccaatgtccgaaagtggttccaccgtgagtcatataaagactgaaagaaatattacgatcgagcatatccttgattccctgtaccatgtcttttgcaggacgtgtctcatgttttcgtccccaatggtcgaaccagccactccagaattcactgcacatcaacggagtttccggacgaagttctttcagtttcttgaattgttggtcaatattggcaccggttccaaaattcacagtccagagcaaatcctccaatgcgttatttgtgaagttactactccagtcacactggaaaagaggcacatccgtaaaccctgattcgcgtaccaaatcacgcacggcagctacataaggcttgtcggttgcataagagctgtattcattctctacctgcaccatgatgatattaccacctttatttatttgcagtggcgccaattgtttgccgacttctttcataaagatgcctacgcgctccatataatagggatcgagcgtacgaagcgccacatcttttttcttcagcagccaccagggaagacctcccatttcccattccgcacacacataaggaccgggacggacaatgacatacatcccatgcttttgtgccgcacgacagaaagcagcaatatcgttctgaccggaaaagtcaaacttaccttcttcctgttcatggatattccaaaagatatagatacaaatggtattcatccccaatgctttgcacatctcaatacgatgttcccaataagcttgcgggatacgggtgtaatgaagttcggcggccttcaccacaaatggttcaccatccagcaaaaaggtattcttgccggcttcaaatttgcgggcagtagtttgtgcctgtgcactactaaagataacgactgtaaaaagtaccagtaaagcaatcaatctgtttctcatggtttattcaaaatagaattttaatagtatacgacaaaggtaggcgattcacctaaatccgagggcataattatcattcaaaaagggttagaaataaagcaaaataactacaaacagggccattttcatttattttcccactacaaaagcaatatccagcataagtccggctatcagtcataacaccaaaatcagttttctttcgtcaacatactttccagttcttccgcattcaggcgaagataaaattgcccgcgataggcgacagagatagctcccgtttcttcggaaacaataatggcgtgtgcatccgactgctgtgagatacccatagcggcccgatgacgcaagccaagttctttaggtatattcaaatcgtgagaaacaggaagaatacatcctgccgctttgatacgtttcttgctgataaccattgccccgtcatgtaacggactattcttgaagaagatgttttcaattaaacgttggttgattgccgcatcaatcatttcacctgtacggacgatttcgtctaaaggaacgttatgctcaatgacaatcagtgcaccgactttttgctttcccatgctcagacaagccattaccacaggcataatatcatcatgtttcaatacttctttcttcgccccgttaaagagacgggccaatgcactgacatgccggtgagaacccaaagtcagcaagaaacggcgtatctcgtcctgaaacagtacgatcagcgctatcacgcccacattcatcaaagtatcgaagatggaacccagcaacttcatctccaaaacctgagtcaccaccaaccagatcagtataaaaaccagaataccggtgaataccttgatagagccggaagccttcatcaacttgtatgtataatacagcaagaaagccgccaacagaatatcaataaaatcttttatgccaaattcaaaaaacatcgttctctgattttaatttttcaacaatgcgaaccgcttccactgcttcgcgtacatcatgtacccgaaggatgtgagcgcctttcattaacgcaacggtatccaatatagttgtcccgttcaacgaatcctgcggagtgccccccaacaatttataaatcatagattttcgtgaaactcctaccaacaaaggtaattcgaatatacggaactcttcgagatgtgccattagttcataattatgctccaacgtcttcccgaacccgaatcccgggtcgagtatgatatccttcactcccaaatcacgaagctgctgaactttacgcgcgaagtaaaggaaaacgtcctttatcagattatcataatggggttctttctgcatattctgcggggtgccctgcatatgcatcatgatatagggcactcccagtccggctactgtctgaaacatccggtcatccatttcaccggcagcaatatcgttaatgatagcaacgccatactcgtttacgcattgcgctgctacatcagcccgaaaagtatctacggaaataatagcctccggatgattgcggttcagaatctccagaccggtgcgtaaccggttcatttcttcttcggcagaaatatgttctgcattaggacgcgaagaataagcgcctatatcgataatagcagcgccttcatcaatgatttgtcgggcccgggcagcaatatcttcttcggtctgcatccggctaccggcataaaaagaatcaggagttacattcagaatacccattacctgcggaatggagagatcaagcaactgcccttttacatttatataaataggagacgtagatttcatcattgacagtattccttttagattgcccacaaatgtagagaaaaaaagcaagcaatcgtactaaaaagaagaaataaacgtatatttgcaaacaacagaagaaaccgaaaacatcataccatgagccaaacagccctatctttcacccgatttctttttttatttttattctttaccgcttctgtaaaagcccagaaagaagctaaagactttaacgttgactctaccctttatgcctattatcaacgttgtcaggaatgcttattgcaacccgttgtacttagcatgtccgataccttgtatcgaatggcagaggaacggcatgataaacggatgcaggcagtagctatttccacccaactggattatcattattttcaggcaacaaatgaagacagcattatctattataccaataaggtgaaagacttcgccaaagcaacccaacaacccaagtattattatttcgcatggtcgaacaggcttattctatattatctgaaaaacggtagaaccaatattgcactttatgaagcgcaaaagatgctgaaagaagcacaagaggaagacgacaaaaccggtctgtcccgctgctacaacatcatgtcgcagatttacacagtcaaaagactggattccatggctttcgaatggcaattgaaagaaatagaactgacggagaaatatgatctggaaaactataacatctcgcaaacatacagccagataagcagttattacatcaataccaaccagccggaaaaggcactggaagcattgaaaaaggcggatgcaaccgcatactcccctacacaaaaaatatccgtgcaactggaatacgttaattattacagcaaattcggagatatgcaggcagccgagaaaatactaaacgaatgtaaaacagcatttgatcaggataaaagattatggtcgataaagaaaagactatataatatagaatacgtctattatctgcaatccaagcaatacccaaaggcactggaagctgccaagaaacaggaagcggaggaattaaaccttagcgaaagtatacagaacagtgtccattacctgacgaaaggaaaaatatacagcaatatgggtaatatgagcgaagcaatcaaatacctgcaaatgtatatcgaagcagaggattctttaaagatagccaatgaacaaatggccagcagcgaatttgccactctgctcgaagtggagaaactcaatgccgaaaaaaaggaattaatgctccaggcacaggaaaaggagatacgcaataagacgacattaatcatctcattaattgttttgttaggtatcctattcatgttcttatacagagagaatttcctgaaacgtaagttgaaagtttcggaaagcgaacttaaaatcaggaatgaagagctcactatatcccgggaggaattgcacaaagccaaagatatagccgaagcaagcagccggatgaagacaacgtttattgaaagtatgacacatgagattcgtacaccgcttaattcgattgtaggcttctcacagattttaaatgaccattatagcaatagtccggaaactcaggaattcgtcaaaatcatagagaataatagtaatgacctactccggttagttaccgacgtgcttgctctgtccgaactcgaccaatatgacaagctacctacgaatatcaccacagacgtcaacgccatctgcgaacttgcttacgaagtagctaaaaataagagccagaaaggagttgaagtattcttcaaacctgaaagagaaagcctgtttatactcagcaatcaggaacgtatctcacaagtattgaataatctgatgcacaacgctgccaaattcacctcgcacggaagtatctgtatagcgtattccatatcggaagctgaaaagaagattgaaatcagtgtcaccgatacaggaatggggatatccgcagacaaacaaaattgcgtattcgaacgtttctataaagtaaattctttcacacaagggacaggactaggactttctatatcccgaagtattgcagaaaaactgggaggcagcctccagatagattcttcttatacagacggatgtcggatcgtactaaccctacctttagtatacgcctaagcaaaaaaccgtccgaagccgtatctaatccgaaagaatagcctatctttgcaacgttttaatagatgttcaggttatgaaactttctgctatttaccagatttttctggattgtcaatcagtaaccactgatagccggaattgtccggacggttcattgtttatcgctctgaaaggcgagtcattcaatggcaatgcctttgccggaaaagcgttggaagacggttgcgcatttgctattattgacgaggcccaatatgccatagagggtgatcgacgatacatactcgtaaacgactgcctgcaaacattgcaacagctagccaactatcatcgacgtcaactcggaacacgggttatcggtatcaccggaaccaatggaaaaacaacaaccaaagaattaatctccgccgttctttctcaaacgcataacattctctatacccaaggaaacctgaacaaccatatcggagtgccaacaactctactccggctgaaaccggaacatgaccttgccgtcatcgaaatgggtgccaatcatcagggagaaatcaaattcctttgtgaaatagccgaaccggattatggcattataaccaatgtcggtaaagctcacttggaaggattcggttcttttgaaggtgtaatcaagactaaaggagagctgtatgacttcctccgcaagaaaggaaattctacaatctttatccaccatgacaatccctatctgatgaatatagccaaaggattgaatctgatttcttatggaagcggggaagatctttatgtcaacggctgcatcacagggaattcaccttatctcgctctcgaatggaaggcagaaaagaatggtgaaatccaccggatacggacgcagttaatcggagagtataatttccccaatgccctggctgccattacaatcggacggttcttcggggtggaagaccggaagatagacgaagcgttggccggatatacaccccagaataatcgttcacagcttaaagagacagcagacaatacccttatcattgatgcatacaatgccaatcctaccagtatggcggctgccctgcaaaactttcggaatatgacagtttctcacaaaatgcttatattgggggacatgcgcgaactgggcaccgaaagtctgaacgaacatcagaagattgttgattacataaaagagagcgactttgaaaaagtatggctggtcggagagcagtttgcatctgtctgtcactctttcaagacgtatgcaaatgtacaagaggtcataaaggaacttgaaacaaataagcctaaaggctataccattctcatcaaaggttccaatgggatcaaacttagctcaacagtagaatatttataatcactgtttcatcattcttggacgcaccacataataagcaaccagacttgcgagcaatgctccggtagaatttgctgcaaaatccagccagtctcctccacggtaactggtacaatattcttgcagcaattctacacacccgctgaacagcacggggcagaagaacgctcctacccaagcatgccacaacggtgcctcgtcccggcgatgtgcacgcaaaaattccagccacaacatacctgacataccgaaatacatacaaatatgaaccagcttgtctaagttaggaatctcactcaaatccgtcttgggcggtttaaaaaatgaaagataaatcacagtcaggattataaaaagtgagatcggatatttcttaatataagatagcatatctaaataatattacatatttcgtgcaaatataagtatcattttctatatttgcactcttataggtatattttataacgatttgtaagataaaacaagatttatgacaaaaaatgatagagcgaacttcggtagtaagttaggcgtaatacttgcttccgccggctcggcagtaggactgggtaatatctggcggtttccctatgaaaccggaaatcacggaggtgctgcatttatattaatctatttagggtgtattctccttttagggcttcctattatgattgcagagtttctgataggacgccattcgcaagctaatacggcaagggcttaccaaaaattagctcccggcacacattggcgctgggtgggacgtatgggagtattggcaggtttcctgattctcagttattatgccgtagttgcagggtggacgctggaatatattctcgaagctgccactaatggtttctcaggaaaaacctccggagaattcatcacctcgttccaacaattctccagtaatccctggcgaccagttatctggttaatagccttcctgctgattacgcacttcatcatcgtgaaaggggtagaaaaaggaatcgagaaatcttccaagattatgatgcctaccttatttattattatagttatattggttgtttgctcggtcactctaccgggagccggtgcgggcatcgagtttctactgaaaccggactttagcaaggtggacggaaatgtatttttgagtgctatgggccaagccttcttctctttaagcctgggaatgggatgtctttgtacgtacgcctcttatttcagcaaagagaccaacctgacaaaaacggctttcagtgtaggaatcattgatactttcgttgcgatattagccggatttatcatcttcccggccgctttctccgtaggcatacaacctgattcgggtccaagcctcatctttatcactctgcctaacgtattccaacaggcattcggcggagtacctatattagcatacatattctctgtgatgttttatgcattgctggcaatggctgcattaacctccacgatttccctgcatgaggtagtaaccgcctatctgcacgaggaattcaacttatcccgtggaaaagcagcaagactcgtgaccggaggatgtatctttttgggaatattctgttcactatccctcggagtgacgaaaggattcacgattttcggtttgggaatgttcgacctcttcgactttgttacggctaaaatcatgttgccgctcggcgggctctgtatttctctctttaccggctggtatcttgataagaaaatcgtctggtcggagattacaaataacggttcaataaaaattcctgtatacaaactaatcatctttatattaaaatatatcgcaccaatcgctatctcactgatatttatcaatgaactgggactaatcaaactataatgtggaaagactttttttatttcactaaaaccgaacgacaaggcattatcgtccttgtcgttcttattataggggtattctcaattccccggctcgtgcaactattctccactcctcaagaagttactcctgaagaagatgagaaattcaagctagaatatgatgaattcatttcatcgatcaaagaaataaaacctcaaaggaaattcgcagaaggggaccctccgaaaaacgattcctattcaccaaaagaagtcaggctctctatattcgatccgaacactgccgattccattacttttatatcattgggattgcctccgtggatagctaaaaacattctgcgttaccgcaagaaacagggaaagttccgtcatccggaagatttccgaaagatatacgggttgacagacgagcaatatcagactttacatccttatatccgtattaccgaacagtcctcaacaaaagataccgtccgactattaatgaaacaaaggatgccgcaggataccctgtttaaatatcagcccggcaccgtcatcaacctgaatgaagcagacacgaccgaacttaagaaaattccaggtatcggaagtgccattgcccgtatgattgtaaattaccggacacagctagggggcttttataaaatagagcaattacaggagaaacatttaaaagcagagatgctccggccctggttctctatcaacgcaacccaaatccgccgtattaacataaataaggcaagtatcgaacggatgatgcatcatccgtatataaactactatcaagccaaagttattgtggaataccgaaaaaagaaagggatcttgacaaacctcaagcaattatcactttacgaggaattcaatacagcagatttcgaacggattactccttatatttgttatgaatagttcctcgtttgtcacaataaataaaaaaagatgcattcctatcacaccagacaagaatgcatcacacacaaacaaaacaaacactctactatcatcttcacagacttccgtagagaagcgactataaatatatagctaaaagatagaacacttgcaaggttctacctttttggtatgcatttttagaagttgagttctcttattaatcttttttaatcatgccgtcaaccatatgtatcgttcggtcggtgattttcgaaagtccctcgtcatgggtaacaatcacaaaagtctgtcccaaacgctccctcaggtcaaagaacagttgatgtaaatcttctttattatgtgtatccaaactaccggaaggttcatccgccagtattacagccggatcattgattaaagcacgcgccacagcaacgcgttgtttctctcctcccgacaactcattcggtttatgggaagcacgctctgccaatcccataaaatcgagtattctaatagcatgttcgtttgcctctttcgaagatactcctgcgataaacgcaggaatcatcacattctccaatgcggtgaactccggcagcaattgatgaaactgaaaaacgaaacctatattcttattacggaatgcagagagttctttttctttcatccggctcactacagttccgtcaatctgcacattacctgcatccggttcgtccaacgttcccatgatctgcaacaaggtagtcttacctgccccactaggacctacaatactgacaatctcgcctttgttaatttccagatcaatacctttcaggacttgcaatgaaccgaagctttttgttattccttctaattttatcatgatatttataatcgtttaatgacatattccgccaaatagcagccgaacacagccggcatataactcactgtcccgcaagttgatttcttattctgttcatcatcagtcagcaatacagctttcggatcagcctgttcggtactgaatactaccggaagtttacgtttcattcccattttctgcaaacgtttccgcaccgccttacttagtccacaatgataagtatcccaaagatctgcaaaacggacctgagagatatcgctctttgctcccgctcccatactggacacaatcttgatatgccgtttcatcgcctcataaatcaagaagcacttcggactgattgtatcaattgcgtctactataaaatcatacttgcctgcgtccaatagttccggtatattctcatctttcagataaacagggagtaccgtcagttcaatatccggattgatatctttataccgggtagccaatacttccgctttcggcattcccaacgtagagtgcatggcaggtaactggcggttcatattcgtaggctgcacggtgtccgcatctacaatagtcattttgccaactcccgtacgacaaagcatttcggcagcataagcgcccactccgcctaatcccacaaccaatacgtgtgccttccggatgcgattcatcttttcttctcctaacaggagttccgttctttgttgccagtcgtttttttccattagcttttctttaaccatttatagaaccatttacccactttctcataatgttgtgattcattatgaccgcgcggatcagagaaagacacaatttcctgcggatctccgaattggtcgggatacaggataatcaaactattgtttgagaaatattttcctagctgcgccggaagacgttcgaaagaggtgtcataagagatagaaccgcgacgggctgagattaccaccagcaaatgatcatagttcacttgccctgttaataacaaaaggtcttcccattcttccaacaaggaaaattcagtcggagttcctgcatattttttctttaccagttgctgaagacgcatcagcgtacgttcattggaaaagaaatgcacgcgacatcccagaatacttcccatacggcagaaatgttccacccattttgagaacccggtttcatattccgcctttggcggtacggcaatatttatccggcgcaaggtattaaccggcatcagaaacttagcgatcatcacctcgcgatgtgtacctttcaaaaggctttccgccaaattcccgaaaaaggtatcaacaatattcgctttccgatgcagaccgattactacatccgtagcttcatattctttaatcgtgtggataattcccgaagcgatgttcaggtcataacggctgaccatatttacaggaacatcggcagcagcggcaatcattgccgctttttccaaatttcgctttccttgcagttctttcttctccgaactgttactatcattaataacgtttaatgcgattaaaccattcttctgtttggcgtcttttatcactaaagccagatttatcaaatcctcaattgtatccgggttagccacgggaatcaatatctgttcggtacttttctttgcaccttgttcctctgattgcaattcctcattcatagcgaaacggcgggcggaacgttctgttaccaaagaactgattacacaagtaaaaagaatcatcaccaccgtaccgttcaacacatcatcattcagcaaacgctccccattctccataataatttcgtgaccgatcaataccgctgcaagcgtagctgctgcctgagcattactaagtccgaatatcatactccgttcattcggttgcatacggtaaatcttctgcgtgatccatgcagccagccatttactaaaagtagctaccactgtcataacgacagcaactttcaatgcctcgcctccggtaaacaggcttcgtacatcaataatcattcctacaccaatcaggaagtaaggaataaacagtgcatttcctacaaattccaaccgattcatcaagggagatacatgaggaatcagacggttcaagaccaatccggcaaggaaagctcccaaaatgccttccattcctacaaactccattaatccaccaccgagaaagaccatcgccagcacgaatacaaattgcatcacgctatcatcgtacttccggaaaaaccaacggccgatacgaggaaagaagaaaacaatcagaaatccgagaaaagcaacttttgccacaagaaatccccagaaccaaccgtcaacagttcctttgaacataccgcctatgacggcaaggattatcaaagcaagagtaacggtaacagccgtaccaccaatcgtaatattgacactgcgcaaacgcgacaatccataacgactgataataggataagctatcaacgtatgagaagcatacatactagccagtaacacagcggtaaggaaaccataacccaacacactcatactactccagatacccaatcccattggaataagaaaagtgagccaaccgaacacaatgcttttcgtccggttcttcttgaagtcttccatgtccatttcgagtccggcaaggaacatgatataatatagtcctactttaccgaagagttcgaagctgctgtcacgatcgagcacgtgaaaaccatgttcacctatcagtactcccgccagaatcatgccaataatatgaggtatatgaaggcgtcccaaaatcatcggagcaaaaagaatgataatcaataccaaaaagaatacccaggtcggatcggttatcggtaaagtcaaattaaaatcaaacaagttcataggctgtggctttaggaattcaatgcaaaggaacaaaaaagttcgcataccaccaataagttacaaggtttgagtcgtgagttttaggttatttcaatacaggttctatcagttactgctaaaaactcatagtcttataacttttttctcacccgaaatactaattatatggcaaaatgttataattttgcagccaaatatcttctattcgacagtgtaagaagataaatacaatattcacaatttaacaaaagaaaaagatgaaagtagctattgttggcgtaagcggagccgtgggacaggaattcctgcgcgtgctcgatgagagaaacttcccgttggacgagttagttttgttcggttctaaacgtagtgccggaacaatttatactttccgcggtaaacagatcgaggtgaaactcttacaacacaacgatgactttaaaggggtagacattgctttcacttctgccggagcaggaacatccaaggaattcgaaaaaacaatcaccaagtatggtgctgtgatgatcgataactccagtgcattccgtatggatgccgatgtacctttggtagtgcctgaagtaaatgccgaagacgcattggaacgtcctcgcggcgtcatcgccaacccgaactgtacgactatccaaatggtagttgcactaaaagccatcgaacagctttctcatataaaaaccgtgcacgtgtctacctatcaggcagcaagtggtgcgggtgctgctgccatggacgaattgtatgaacaatatcgccaagtattggctaacgaacctgttaccgtggaaaagttcgcgtatcagttggcattcaacctgattcctcagattgacgtcttcaccgaaaatggttacaccaaagaagaaatgaagatgttcaacgaaacacgcaaaatcatgcactccgatatcaaagtcagtgctacttgcgtacgtgttcctgcattacgtgctcactctgaaagcatttgggtagaaacagaacgtccgatttccgtagaagaagcccgcgaagcattcgccaagggcgaaggattggttcttcaggacaatccggcagaaaaggaatatccgatgccgttgttccttgcaggtaaagatccggtttacgtaggacgtatccgtaaagacctgacgaacgaaaacggactgactttctggattgtaggtgaccagatcaagaaaggtgcggcattgaacgcagtacagatagctgagtatctgattaaagtaaaaaacgtataagaaggcataaagcctaaggatatccaaatgatcgacttagggatattcctaaaataagaaaatgcaaggcaactaattcgctatgaattagttgcctttttacatctttaagcattccctcgaaaatacagttgacgacgaaaacgggagtaacttactgtttttcttattattacacaccattttttaatattagtattctatttcacagtatgagcccacacaaaaggaatataattgaacctttttcctttttccgttatactaaagactatttcctttttcaactttatttccatttcttgataaacagaaaccggtactgttgcaagcatactaacagccggaaaacgatattctacatcacgtattattcctgtgttagtatcaacacgcagtattattataaatttgcaaccttgtacccgcgttctctcctcttcagaaaaagattcattcaaaatagacaaacattttccccataactgactatcatctacaaagtttgcctcttttctttcagcatcagtaatttctgcgcccgtttctttattgacagcttcaacttctgtaaacttattacttttactatatagccttacagacttggattcttgtgttacatcacaaacataacgctgagcataaaacacctgagtagtatcataataaaatgtttgtgcatacatatcaactagcacaaataacaaactaactaggactattactttttttctcatatcaacaatttttagctatttctcttaaattttcaaaatcaaattccacaccacgactattgtcatatggataatctttataggcatcagtttttctaaaaacatttacaatattattttcaataagaccattcacatattccggtgacatatcaggtagtaatctccttttattggcaatatatgtacttaacatctgtatcgctatgcctcgattgtctgcatgctcagccgcaaacgaccatcttggagcatcatcctcactctttaataaataacagtattgcgcaaatgtgcctcaattccataattcattttcgcattgcagaatgaagtgatgttcttctcctttcgatactggtacgcatgaaacaattcatgaaaaagttcgttgctctccaactttgaatttattctaagaagattgttttgtggataatatgccgtatctatctaaaaatgtatatcaaaagtagtaaataataatattaaagacaagatatatatagtttttctcgaaatcaattaagcaaataaattaacgtaaccattgcattcctgcttctctggcagttgccgtggtgctacacaatttctttgtcgtaaagccggagaagatttcctttacgctatgcagttccgtgatcggtgacttcgtcatgatggggcaagaggaagagaaaggaaccgtacgctgtgacctcaccggaaatatttattcggaaacagtattcgccagtatcctgtccatgttttatttccgccggttgatgtccgacgagcgttttccggacactctcaacggagtaaccgttactcccaagatagtacagacggagaacttcaacttccgaaatgtccctaccgatataaataccccatctatcaggctgtaccctctgttggagtccatgttcggacgcgtagacttgaaaatgcccggcataacattcacttcctatacggataaatatgtaatgccccgcttcgaatagtcttttaatgttacctataaataaaatgaatcagagattaccggaagcctataaaacagaatggctcccggcagtccttgattattatttctaaattccacttaaaacaatagacgattttttttctttattcaacagaaagccatacctttgtccccgtaatcataagataagccgcaattgtctctgcgttattcacaaacaaatacggttaaataaaatgactttatacaaaaccgtatgagaatttgtaagactttcacgtttctaagtatctttattgtcttattctataattgttcgcttcccgccgacgatgaagatgagggaaatccagaagaagataatactacatccgaactgccctgggaaggagaaacagataaattcacaatcaactctaaagaaggactgcgcctgaacgatccgcaagaaaatgcaggaaccgcttatgtcactataccttccagctccgtaaagaatacccgttgggagttcggagtccgccttacattcaatccttccgccaacaattatgcccgattttacctgacttcttcttcaaatgtactctccggcaacgtaaacggttactatatccaaataggaggagccaaagacaacgttgccctttaccggcagaacggagaacaacccaagctgttggcttcgggaagggaagtgatgaaaggaaacaactcacccaagttatacataaaagtggaatgtgataacaatggttactggactttctggacacgactggaatcagaaaatgaatacaccaaagaaaagcaagtaaaagacaacaacatcctgacttctctttattgtggaatatactgtatttataccaagacacgttgtaaaggtttcacattccaccatatacaattgtccaatgatgtggagactactaccaaacctactgaaacacctgatgagccagataaacctgatgttcccgaagatccggttctgcctgattatccggaagaagtcaagaatatattatcattcaacgaaatcatgtatgacaatgcaacagacggtgcggaatacatagagttttataatccgggtaacaacgatatttctattccggcattaaaacttctaagatatatcgacacagataacggctcaacagaaaccaagacaacggtagtcttgaaacacccggacaacaatcaaaacatctgcatttcttcccacggatatatatgcctgaccaaatctgccgccgcacttagaaaaaagcataaagtaaacggagaaaccattatagagattcccaacttcccgaagttgactaatgaagacagccacctggctataatgactaacgaagaaaatccccgaatgatcgacaagtgcagctatcttgagtcaatgcatagttccggtaacaaaaggaaccaaggtatctctctcgaaaagaaatcaccggacttagtatcttcaaagcaagctaactggcattcttccaaagacccgacaggaggaacacccggaataaagaatacacaagaataatcagggtttctatgataaatgtctatattcaatcctccaaacagagtctaaataaagagcgaaatgagaaacctcaatttttacaatccaaaaatattaccacaattacaaactaatccctatctttgcagcaaagccaataaatgtaaagtataaaacaacatctaatcacatatatatcatgaaaaagcaacacttgataattattcttttattcagttttctattagccgttccggctgtacaagcacaaaagaaagttctacctgcagaactggaagttgaactcaaatatggcgccgaccgtctcggtaaaagacaggaccctgctatgcagaagtttcgcgaaaaccgtttgggtgcattcattcactgggggttatatgccattcccggcggtgaatggaacaataaaacataccacggcgctgccgaatggttgaaagcgtgggccaaagttccgactacggactggctgaaacttatgaaacaatggaatccccaacagtttgatgccaagaaatgggctaaaatggccaaagaaatgggagtaaaatatgtaaagataaccaccaaacaccatgaaggcttttgcctgtggcccagcaaatatacagagtatacggtagctaataccccttacaagaaagatatcttgggagaattggtaaaggcttataatgcagtcggtatcgacgtacatttctatttctccgtgttggactggagtcatccggactggcgaagcagtatcaagacccaggaagatagcatcgctttccaaagattcctgacatttaccgacaatcagttgaaagaactggcaacccgctaccctactgtcaaggatttctggtttgacggaacatgggacgcaagtatcaagcaaaacggttggtggactgcacacgtggaacgtatgctgaaagaaatgcttcccggtgtaactatcaacagccgattgcgggccgatgattacgggaaacgccatttcgacagcaacggacatctcatgggggactatgaatcggcttacgagcgccgcctgcctgatcccgtaaaagacttacacgtaacaaaatgggattgggaagcctgtatgactattcccgaaaaccaatggggataccacaaagactggtcactgagctatgtgaaaaatccgactgaggtattggcacgtattgtacacgccgtatctatgggtggaaatatggtagtcaacttcggccctcagcccgacggagacttccgcccggaagagaaaaagatagccgatttcatcggtaaatggatgaagaaaaacagcgaatgtatctatggttgcgattatgccggctgggagaaacaagattggggatattatacccgcaaaagcaatcaagtctatatggtcgtattcaaccctccctattccggacagctcacagttaaaactcccaaagggataactatcaccaccgcaaagacattgacgggtgaacaaacccaggtaacagaaaccactcgcaatgaatataatgtcagcctgcctaaaaatatgccgcaggagccgtttgttattaagttggaagtaaaagatgcacaaaaaacgcaggataagtaccgggaagcgcttacataagtgcgaaacgaatcgaatcctttaaacagtagatatgagtccaatcgttttgtccgttactatcgtggcatacttcgcaatcctgttcacaatctcttatatagcaggacacaaggccgataatgaaggtttcttcgtaggaaaccataaatcggcatggtatatcgtcgcttttgccatgatcggctccaccatctccggagttactttcgtttctgttccgggcatggtgcaagccagcagtttttcctatctacaaatggtattgggattcatcgtcgggcaaattatcatagcgtttgtgctcgtcccgcttttctaccgcatgaatttggtatccatttacgaatatttggagaacaggttcggctcctcgtcttataagacaggcgcatggtttttctttatctcaaagatgttgggggcagccgtacggctattcctcgtttgtctgacactgcaactgctcattttcgagccctttcacctccctttcctgctgaacgtcattctcaccgtatttattgtgtggctctatacattccggggaggtgtgaaatcactgatatggacagatgtactcaaaacattctgtctcgttgtttctgttgtcctgtgcatttattatatagcttcgagcctgcacctgaattttaacagcttagtcactaccctatcggacagtgatttctccaagacattctttttcgatgatgtgaatgacaagcgatatttcttcaaacaatttctggcgggtgtatttaccgtcattgccatgaacggactcgaccaggacatgatgcaacgtaatcttagttgcaagaacttccgggattctcaaaagaacatgattacaagcggcatctcacaattcttcgtgattctgcttttcttgatgttaggggtattactctatacattcacagcgcaacaaggcattaagaatccggataagagtgatgagatattccctatgattgccacgggaaactactttccgggtatagtcggtatcctattcatcatcggattaatagcttccgcctactcggctgccggctcggcattaaccgcactgaccacctctttcactgtcgatattctgaatgcacagaaaaaaggggaggccgctctcagcaagatacgcaagcacgtacatatcggcatggcaatcgttatgggaatcattattttcgttttcaacctgctgaataataccagcgtcattgatgcgatttatacattagccagttacacgtatggtcctattctcggattgttcgccttcggtatcttcaccaagaaacaaatttacgataaatatatcccgccgatagctatcgcttcccctgtcctctgctatatcctgcaaagaaattcggaagcatggttcaacggttatcaaatcagttacgaactgctattatttaacgctgcatttactttcaccgggctttgcttccttattcgaaagaaatcaaccataaacaatacgacagctctttaataccaattagcaaaatgaaaaaaagaatcaattgctttatacctttcggcacttcggaagatacaatgcaaacagtgaaagaattacaagcgtcagagctagtagataaaatctatttattaggttctgctcccggtaagaaatgtctcccggattgtgaatggctccctatcgatgggctttactccacaagtacgatgaaaacaatcgcagctcatgcaagtacagactacattctgttgtacaccaaacaaactccattaaagttgggattatatgcattggaacgcatggtgcaagttatggagaacaacaagaaaaatggaatagtatatgccgaccgctatcaacagattcatgaagaactaaaacaagcacccgtcattgattaccaattgggaagtgttcgagatgatttcgacttcggttccatacttttattcagcacttccgcattcacttacacagcggataaactgtacaaaagatatcaatatgcaggactatataatatgcgcttgttcatagctgtcaactattccattatacacattaacgaatatttatataccgaagttgaaactgataccagaaaaagcggagagaaacaattcgactatgtagatcccaaaaatcgggaagtacagctcgaaatggaagctgcttgcacagaatatctgaaatgcattgatgcctacttaatgccttcttcttcacggacagtcaatctttgcaacgagacctttgaatttgaagtatccgtaatcatccctgtccgcaatcgtattcatactattcgtgatgcagtcagctctgctttaaaccaacagactacctttcctttcaacgttatcgttatcgacaatcattcgaccgacggaactaccgaagcgcttcaggaactaagcgcagacaaaagattgattcatttcattccccaagagaatgatttaggtataggcggctgctggaacaagggtgtacatcacgagaaatgcggaaagttcgccatacagttagatagcgacgacttatataaagacgaacatacaatccagaaaatcgtggatactttttataaggaaagctgcgcaatggtgataggaacgtatctaatgaccgacttccacttgaacgaaatagcccccggcatcattgaccataaagaatggacattggagaacggaaaaaacaatgctttacgcatcaatggtttgggcgctccacgtgctttctatacccctatcattcgtaacatcaaatttccaaacaccagctacggtgaagattatgccataggattaaacatttcacgcgattataagatcggacgtatctatgatataatatacctttgccgacgttgggaaggtaattcagatgccgcattaagtattgaaaaagtcaatcagaacaacttttataaagacagaatccgcacttgggaaatacaaagcagaattcagatgcatacgattgatgaagattttcaggagcttgtagaagaaatgatagaagatcagaaagaaaactgggaactcgcgaaaaagaattatgaggcactggaagaaaatctggaaaaagcaaaagaactggaagtcgaagaagatgatattgaaatggtgttccgaattttccccaaccctcaacgcgccctctccactatggcaaaaacggatacccgctccattcaggaaagaccatgtttcttatgcgaaaagaatcgccctgcagaacaaaccagtttgccgttcggacattatgagatatgcctcaacccttaccccatttttcagcggcacttgacaatcatcgacaaggaacatacctcacaaagcattaaaggacgttttgaagatatgcttcacttagccgaaaatatgatagacttctatatactctataacggcccggagtgcggtgcttctgctcctgaccacatgcacttccaagcagcaggaaaagaggaaagtttatctactccctttttcaaggattttctgaacgatataatagaacaaacagacttcgacgatgtcccggctatcgtaaatagctatgcaaacaatacttttataaccagcattggtctagcatcaattctcaggtctgaattaatagagaaattcgagaatatctacaacatcctctctaccttttacggtaaagaacctttaatcaatataatagcttggtatgcaattgacagtacaaagcatggcgaagatgatgaagtggtagcttggaattgcgtcattttcctacgttccaaacatcgtcccgactgttactataaccaaggggaaaaaggattgttaataagtcctgctgttgcagaaatgggtggtgttttccctattatcagagaggaggatatggataaattaaacacaaaagagattattgatatttacaaggaaattagtttgtcaccggagcagtttgaaaccctatgtgacgaattattcagaaaagacgaagtgtaaaactttatgcaggagcctgtcattacagtcggtattctttccgggaaagagattggattctctttcccgaaagaatttatatcttctgacggaatagcaatctgcggaatacaacaggctgtctatcggaaaggaaaaatctgttggcaggagaaagaatatgacgaactctccttcactccccaacaagatacttcttctttctttgaactgcaagacgtaaccataggcatcaacttccattgggaacgtaaagaagttcaaagattcaaaggtgaactgaagattattgttgaagatgacagactgactgctatcaatataattcctattgaagattatctcaccagcgtgatttcatcagagatgagtgcaacagcttctttggagctattaaaagcacatgccgttatttcccgaagctggctgcttaataagttgaaagttgcaaatgggaaattgaaagttattatgcacccagacaacacagccaactttgaactttcaactctcccctctcaacttattaaatggtacgaccatgaagcccacaaaaactttgatatatgtgccgatgaccattgccagcgttatcaaggcattacacgcgcctcaactccacaggcaattgaagctgtttttgctacacggggtgaagtacttatgtatgaaggagagatttgtgacgctcgtttctctaaatgttgcggcggcgctttcgaagaattccagaactgctgggagaatgtaaagcatccctatcttatcggtcaacgggatagtaaaacagaaacgcgacttcccgacctgacaaaagaagtggaagccgataaatggatacgtacttctcctgcggccttttgcaacacccataacaaacaagtgttgagtcaggtattgaataattatgaccaggaaacaacagacttttaccgttggagagtctgctactcccaacaagaactctcggaactgattcataaacgttcaggaatcgagttcggaaaaatcattgatttgattccggtcgaacggggaacttcaggacggctggtccgattgaaaatagtaggaacgttacgcactctcatcatcggcaaagagttggagatccgtcgtaccctatcatcttcccacttatatagctccgctttcgttgtggacaaagaatacaaagaagatgaaaaagaaatcccttcccggtttatcctcacgggatccggctggggacatggcgtgggactttgccagatcggtgccgccgtaatgggggaacaaggctataaatacaaagaaatactatcccactactaccccggtagtgcgattgagcaacaatataaatagaacccaatgaataccatgacaacgccaaccctgaaaagagacccttggagctggattccaaccctctactttgcagaaggacttccctatgtagcagtaatgacaatcgctgtcatcatgtataaacgtctggggttatcgaatacagaaatagctctttacacctcctggctttacctgccgtggactatcaagcccttatggagcccgttcgttgatctgattaaaacgaaacgagcctggattattgccatgcaaggatttatctcagccggatttgccggtattgcctttttcatcccgacaacacactacgtacaattcaccctggcttttttctggctgctggcattcagttccgccactcatgacattgcagcagacggtttttatatgctcggactcaataacaaggaacaatccttctttgtaggtcttcggaatacgttctaccggtttgccagtattttcggtcaaggagttcttgtgatgttggcgggttggctggaaacattacaaaataatgtacctctggcatggagcattactttctatcttatggcaggactatttttggcactcactatctatcatcgtttcatgctcccttatcccgattccgacgtcaaacgggaaggcctgacacccagcaaactgctagaagacttctttaaaacctttgtctcttttttccagaagaaacatataggtcttatgttctttttcctgctcacctaccgactgggcgaatctcaattagccaaaatcgcctcacctttccttctggatagtatcgaaaaaggaggattggctctatctacaacaacagtcggaatgatttatggtaccataggcgttgcagctctcttattcggtggaatcatcagcggtttgctcgtttcccaagacggattcaaaaaatggatattacccatggcattagcgattaatctccccgacctgttatatatctggttggcagcagcaaccccagataacctcattctaatatctatttgtgtcgccattgagcagctaggctacggttttggtttcactgcctatatgctttatctgatttatattgcggaaggcgagcacaagactgctcattatgctatcggaaccggatttatggcattgggcatgatgattccgggaatgcccgcaggctggatacaggaacacatcggatataccagtttctttatctgggtctgtatttgcaccatacccggcattatagcctcattgatgattcgcaatcggctggatgattctttcggtaagaaacaataaacaatttacttaataacttaacacattaacaagtaacagtcatgaatgtaacaagtaacaaacgtctgttggcacttgatgtaatgcgaggcattactatcgcaggaatgattctggtgaataatccgggttcatggggatatgtatattcccctcttaaacatgctcaatggaacggtctcacccccacagacctgatttttcctttctttatgtttatcatgggaatctctacttacatttcactcagaaagtataacttcacgttcagtacccccgcagccctgaaaattatcaaaagaacgattgtcattttccttatcgggatagccatcaactggtttgccttgctttgctactatcacgacccgcttccctttgcccaaatccgggttctgggagtgatgcaacggcttgccctttgctacggagcatccgcattaattgccttgcttattaaacacaagtatatcccttatctgatcgtcgccttattagtgggttacttcatactcctcatcaccggcaacggctttgcctacaacgaaacgaacattctttccattgtagaccgtagcatcctgggagatgcacacatgtatcaggacaatcacatcgacccggaaggacttctaagcactatcccttctattgcacacgtactgataggcttttgtgtcggcaaactactaatggaagtgaaagatatccgcgaaaaattggaacgtctctttcttatcggtacgattctcacttttgcaggtttcctgcttagctatggatgtccgttgaacaaaaagatatggtcgccgacttttgttctggtcacttgcggattaggttccagttttctggctttactcgtctggattatcgacataaaaggatacaagaaatggagccgtttcttcgaatccttcggagtaaatccgctctttatctatgtactggcagatgttctcgctatcctgctaggtgtcattaccgtcacatatcagggagaaaacacttccttgcagcaagtcttttatgccggtgtccttcagcccgttttcggtaatgaaagcggttcccttgcttatgccattctatttgtccttctcaactgggcaataggctatatattatataaaaagaaaatatacattaagatatgatacttattgcagatagcggttctaccaaaaccgattggtgcattgtattcaatggcaccctgattaaacgaattggaacgaaagggataaaccctttcttccaatcggaagaggaaatccaacaagagttaactgcctctctcctgccacagttaccggaagggacgataaactccgtttatttctacggtgcaggatgtacgcccgaaaaagctcccgtcctccgacgggcaattgccgacagcctgcccgtcataggaaatataaaagccaattcggatatgcttgccgccgcccgcggactatgtggacacgaagcaggcattgcctgtatcctcggcacgggttccaactcctgcttttacaatggcgaagagattataagtaacatttcacctcttggatttattctgggtgacgaaggaagcggcgcagtattaggtaaactgctggtaggcgatgtactgaaaaaccagcttccgtcaaccataaaagaggcttttttaaagcaattcgacctgacagtccccgaaatcatcgaccgggtttaccgtcagcctttcccgaaccgttttttggcaagcctctctcctttcctggctcaacacctggacgaacctgctatccgcacactcgtgctcaatagcttcattgctttccttcgcagaaatgtaatgcaatatgattataagcaatatccggcacatttcatcggttctgttgcacattgttataaggatatattacaagaggcagcacagcaaacagggattcaagtcggtaaaatcctccaaagtccaatggaaggattaatccaatatcatcaaaaataatttctctatctacaattaattggtaaacagtaatttgtattatgcagataaccgaacaaccatcgctttacgatcacctggaaaagaaatccgtacgggaaatactggaagacatcaatcgtgaagatcaaaaggtagcatcagccgtacagaaagcaattccgcagattgagcaccttgtcaacctgattgtcccccgcatgagacaaggcggacgtatcttctatatgggggcagggacaagcggccgtttaggagtattggacgcttcggaggttccccctaccttcggaatgtctcccaattggattatcggactgatagcaggaggtgatacggccttgcgcaatcccgtagagggcgccgaagatgacacaaaccgtggttgggaagaattgaccgaacatcacatcaacaataaggataccgttatcggcattgccgcttccggcactactccttatgtaataggagctttacacgaagcacgcaaacaggggatcctgactggttgcatcactagtaatcccgattctcctatggcagcagaagcggatgttgccattgaaatgatcgtcggaccggaatatgtcacaggcagttcccgaatgaaatccggcaccgggcaaaaaatgattctaaacatgatcagcacttctgtgatgatccaactcggacgggtgaaaggaaacaaaatggtgaacatgcaattgagcaatcaaaagttagtggaaagaggaacacggatgattatggaggaattaggattagaccacgatcatgcccaaaagttattattgcttcatggttcggtaaagaaagtaattgacgcaaacagccaatcatttcaccgaaatacaaagtctaattaacctataccgaattttaggagagggacaggaataaactgtaccatgctctctgttttgtaaattgatgaagaaagagggtgtccgaaaagtgaagtgcaccccaaaagttttttgtctaacttttggggtgcacttcataatagacgcaacacctgtttatctttattatactatataagattataattctacaatcttatctaactttacgttatagaccaatgccgaataaggttgtaaagaaccgtcttcgctagtaccggagccatatccactctgataaggaatatacaaagtccataattcaccttctgtcatatgcatcaatgtatatgaccaacctgtaattaccccgtccaaagaaaatttggatggtgaatcgtagttgctaggtttaatcccattaaagttctgctgcaccacatctccgttaaaataagtcatacgataatatgcacttaccgtagaagtatatagtggttttttctgactgctattttcatccttactaatcttcttaacgtacaacatttgattattagtcggatctttgtaagcatgaagtttttccgggtcgttatccggcaaagccttattctcggcgctgttatatacatttgcaatagaatcaatgaatgcctcactacgtgcctgccaattatcatagcgacccgcctcctctgtttcactacaagcagtaaacgtcagagccagcaatactaaagaaaataaatagatctttttactcattcgtcaaaggtttattgtaaagttttcaatagagaagtgatacttactctgtctgcaatgatattattcagttcagagatagccacacgttcttgctgcatggtatcgcggttacgcaatgtcacacagttatcttccaatgtctgatgatcgactgttacacagtacggggtaccgattgcatcctgacggcggtaacgcttgccgatgctatctttttcgtcatattggcaatggaaatggaacttcaggtcatcgatgatttcacgcgctttttcaggcagaccgtctttcttcaccaacggcataaccgccagtttcaccggagccaaagcagcaggcaatttcaaaacaacacggctttcaccattttccagttgttcttcgcaataagcggcgctcataatgctaaggaacatacggtctacaccgatagaagtttcaattacatacggagtatatgattcgttcagttcagggtcgaagtatttaatgctctttccggagaacttctcatgttgtgacaagtcgaagttggtacgggagtggataccttctacctctttgaagccaaacggcatcaggaattcgatgtcagttgcagcatttgcataatgcgccaatttatcgtgatcatgataacgatagcttgcatcgccgaagcccagcgccttatgccatttcagacggatttctttccatttcttgaaccagtcaagttccgttcccggttttacgaagaactgcatttccatttgttcgaactcacgcatacggaagatgaactgacgggcaacgatctcgttacggaaagccttaccgatctgtgcaataccgaaaggaactttcatacgacctgttttctgcacattcagatagtttacgaaaataccttgtgccgtttccggacgaaggtaaatcttcatagaaccgtcggcagtagaacccatttcggtagagaacatcagattgaattgacgaacctctgtccagttcttagttcctgaaatcgggcatacgatttcttcatcaataataatctgacgaagttcctccagattattgtcgttcagtgcttttgcgaaacgggtatgaagagcatcacgttttgcctgatgttccaacacacgtccgttggtagaacggaattgagcctcatcaaagctttctccgaatcttttggcagctttcgctacttccttattgattttatcgtcatatttagccaactgatcttcaatcagtacgtcggcacgatagcgtttcttggaatctttgttgtcaatcaatgggtcattgaatgcatcaacgtgtccggaagccttccagatagtaggatgcataaatatggcagagtcgatcccgacaatgttttcgtgcaacagcaccatgctgtcccaccagtatttcttgatattattcttcaattcaacgcccatttgaccgtagtcatacacagcgcccagtccgtcgtagatatcgcttgaaggaaatacgaaaccgtactctttacagtgcgatactagtttcttaaaaacgtcttcttgtgccattttcttttctatatctattaatttgattttgcttttttcgtaaaaagtgccacaaagatagggatttatctcataaataagacaggtagggtattaatttatcttattcctgaacttcttcgccgaaacgggaaacgagaaaagaagataagcctcctcttttttgttcaaaaatataaagtcggaatatgttattatagtttatcacattaatagttgaaattaaaacatttcaatgaatgcgtttcaaataaatcaaaaagtgtttactctttattcataatcgattaaaccttttctaataaataaatgaatcgtttattataaacgtcaccctagtttgttataaactttcgcacgcccttccaaagcgaatatatcaatattatgcaacaataaaggctgcgaatttataataaatccacagcctttattccccaaatcgtttttgtgagtctatttccatagacaccaaacgtctatgtcgtcaaattatagtaccattccaaggtacaagaagatcctctatgatagcaaaaagcaattctttttttcatttattccggtttttagctaaaagacaatagtcgattacaaatatacaatataaataagacgttgtcaagtaaatctgttattggcagagttaaataatgaaagaatgaatctttaaaaagttatgcatatcatttataaatgtctttattcaaagatataccaattaaatccttttgcgggtattctaattttcaacgaaatagaatagtctctgtcaacagtataggtccgggctttgccatcctgttcttttacccgaactttatcatgcaaaccggtatagtataatggtacccgaatagtgcgttcgatgtcagttaaaagagggttatacacagccagaaagcctttctgttgaatgtcaggattaacatgcaggataccatcccagtctctgccatcagggcgacgtaaatgaacaatatcagaatctagaatacgacgatatttcttataaaaagcgacccaatgacttaccattttgcgagtatcctccgtatcatacagtcggggacctcgaaaacatgcctggactcccgccccgaatagattctgcaaacgaatctggtaatgctccaaatgttcgcaaagaggctcaatagtcgcagcttccccgcctccatgatattgtgtaagaggaacaaacataaagcccatagtcggagttttctgccaagttccatcatatatgttttggcgttcaataatttcctgatatgcacggggcaacgaccagtttgtttctacatatcccattggggttttgttggagccattgagaaaataccaatcgggaacattcaaatatatgccctgttcacgacaccaacgataaaagtgccgtatcacctcccattgcttccattgggaatccaaatagccgcgatgatgtttgtgttgtgtcgaagcacaaggatctccgggataagaaccgtcattctcaaatacccccatacccgtctgcgtaaagaatgagcgtaacttgccaaagtaagtatctccccatgaagaagcaagacaaggagattttccaaagcggcttccctcttcccgtgttgtagcaggttttcctgtctttctactgatagcggcatcttccgtcttggcgcctctgcttgccaatagcgaatatccgccgagtgctatacctttagagtgagcataagcattcagccgtttcatcatttccatatattccggagaattgttttctatattaaacccgctgccaaaagtcattattaccatttcaaaaccaacagcggcacattggtctatggcggccttaacagaagcttcatccgagcggcgaacgtgcataaaaataggattctcttgagtccagggtgccatcattctccaaaaacggcattccgctaacccgcggcgttcattatcagtggcatctctcagcatttcaaaagctgtgcatgaacggaaagtcattcccggagttatttcataatcaggaccaataggcgggcatacttctaaacgcgccggtttgtactgtccgtaataccgtattccggtagcttcatattccggatggtcgaacacccaacggactgccggattgtctttcatcgcttccatatcacctcccatggcataatcagtcactacaaagagctgtgtaaagcgatctatatattcacgaggcgcgtcagtctgtgcaggagatttccgataattacgagtgtaagtacccggttcctgagccaacatacgtatttcatgcggttcaccatagtgcactttgggagctgtttccgttaaagccagtatttcagatttaaaagaattcagaacaatcgaagattttccttgattttcaacttctatctgttttgacaggataggagccccatcatatagctcatagatcacttttaccgtcacattccgtatcatttccggtgcacgtggggcagctttatatataaaaacaatccgcttgccgggagccggccatggatttttgttcgacaaccattcttgtttgggacgatagggaaaacgttcgatcgtttctcccactgtatggctcacatacgtgaatgcagtgtcgcaacttatcatatcctcaataaaatcgttattcagaaaattttgaaccggttgtttataaagccctcctaccggatattccataccattaatggtcaatacagcttccggacggatagcacgcagctccgcattgccattcatcaaattgtcaaatgcaatcgttgcgacattaggagataatatgaatgtacgtgagagtagcccgttactaaggcacaattctttatcggtagttgtcactttggcttgataggatgatccgtcaatcaaccaatctttttgaagattcaatgcaagagaatattgtacttgtaatgcacacaatatcaccaggatgtgttttttaaggtgtttcatataactcaatatattatatagataaattcaaacataagcaaaaatacaggaggtgcataatttatatacacacaaatattgtaaaaaagtacggttttcaatctacatgaacaaaataagcacattttatggaggatttgaacacatttctactaaaaaagtctatcggcagaattaaatatacacaaagtcaactccgccaaccggtcaaataaatcaagaatatgactctttatcccattaacctgtatgttcagaaagcaaatccggtgcctgctaaaagattaatgaagctgtcagtatcataaaaaacgtgagttcttttcgtcctcatatgaatttatttcgtatttttgcgtggacatccccttttttgatgttcaggaagattatttgttgtaaaagcaaagtgaagattgatttatgagtgacgaaattaacgagataccggaagaacattcagactacaaaccggcggacgcacgggacgaaaacgtaaaacaccagttaacaggcatgtatcagaattggtttctggactacgcctcatacgttattctggaacgtgccgtaccccatatcaacgacggtttgaaacctgtgcaacgccgtatcctgcattctatgaaacgtctggacgacgggcgatataacaaagtggcaaatattgtgggacacacgatgcagttccaccctcacggtgacgcttccatcggcgacgctctggtgcaactcggacagaaagatttgctaatcgactgtcagggtaactggggtaatatccttacgggagatggtgctgccgccccccgttatatcgaggcacgcctttccaagtttgcactggatgttgtcttcaatcccaagactaccgaatggaaattgtcttatgacggacgaaacaaggaaccggtcactctccctgtgaaattcccgttattgctggcgcaaggagtggaaggtatcgccgtcgggctttcttccaagatactgccgcacaacttcaacgaactttgcgatgcctctatcaactacctccgtggagaagagttccaactatatcccgatttccagacgggtggttctatcgacgtagccaaatacaacgatggcgaacgtggcggagccgtaaaagtacgtgcgaaaatcaacaagctggacaacaaaacgcttgctatcacggaaatcccttacggaaaaaccacttcatccgtaatcgactctatcctgaaagctgttgacaagggaaaaatcaaaatccgcaaggtggatgacaatacggctgccaacgtagaaatactggtacacctcgcccccggcacttcgtcggacaaaacgattgatgcactatacgctttcaccgactgcgaagtgagcatctctcccaactgctgcgtaattgacgacagcaaacctcatttcctcaccgtcagcaaagtcctgaaaaagtcggcagacaacacactggatttgctgaagcaggaactggaaatcaagaaaggggaaatcctggaagcactgcatttcgcttccctcgaaaagatatttatcgaagaacgtatctataaagacaaagagttcgagcagtccaaagatatggacgctgcctgcgaacacatcgacgaacggctgaccccgttctatccaagttttatccgtgaggtgaccaaggaggatatcctcaaactaatggaaatcaaaatgggacgtatcctgaagttcaactcggacaaagcggacgaactcattgcccggatgaaagaggatattgccgaaattgacgaccacctggcgcacatcgtcgactataccgtcaactggtatcagatgttgaagaacaaatacggcaagaacttccctcgtcgtaccgaactgcgtaacttcgacacgatcgaagccgccaaagtggtggaagccaacgaaaaactttacatcaaccgcgaagaaggatttatcggaacagccttgaagaaggacgagttcgtagccaactgctcggatatcgacgacgtgattgtcttcttccgcgacggaaaatatatcgtcactccggtagccgacaagaaatttgtaggcaagaacatactttatgtcaatgtcttcaagaagaatgacaaacgtacaatctataatgtcacctaccgcgacggcaaggaaggcacaacctatatcaagcgttttgcagtcacttccgttgtccgcgaccgcgaatatgacgtcacgcaagggacaccggattcacgtatcacttatttcagtgccaatccgaacggggaagccgaaatcatcaaggtgactttaaaaccgaatccgcgtgtgcggcgtattatcttcgagcgtgactttagtgagatcagtatcaagggacgacaagcacagggagttatcctgacccgcctgccggtacacaagatagccttgaaacagaaaggcggttccacactcggcggacgtaaggtatggtttgaccgtgatatcctccgtctcaattatgacggacgcggcgaatatctgggcgagttccagagcgacgacaccatactcgttgtgctgaacaacggtgacttttacaccagcaacttcgacctgagcaatcactacgaagacaacgtaagtattgtcgagaaattcgactccaacaaggtatggactgccgcgctatatgatgccgaccagcagaattacccgtacctgaaacgtttctgcttcgaaggttccaaccgtaagcagaactatctgggcgaaaacaagaataaccgcctcatcctgctgaccgacgagttttatccccgcctggaagtgatattcggcggacacgacagtttccgagaaccattggaaatcgatgcggacgagtttattgctgtcaagggattcaaagctaaaggtaaacgtatcaccacttacacagtggagacgattaacgagctcgaaccgacccgcttccccgaaccggaacaggaaccgcaggaagaggcaagtgaagaacccgaaaatctggacccggacagtgacaaaagcgaaggggatattattgatgaaatcaccgggcagatgaaattattctgatgaagaaaaaactaatatacttggggctgacaggatgcatcctgttcgccctttgcacaaaattacaggcacagattgattccctgcagactcatcgttatgtaacacgtgccaccatgtacggcatcggttttaccaatgtgttcgacacctacctgtcaccacaggaatataagggaatcgacttccgcatttcccgcgaaacaatccgtatgacaaagttgttcgacggcaatgtttccgtacagaatttctttcaggcagatatcggctatacgcataaccgtgccgacaacaacaatacattctccggattagtcaactggaattacggcctgcattaccagttccgcctgacggagaactttaaattactggccggaggactgatagacgccaacggcggctttgtctacaatctccgtaacacgaacaatccggcttccgcaagggcatacgtcaatctggacgcttcaggaatggccatctggcatctcaaaatcaaacgctatccaatggtgttgcgctatcaagtgaaccttcctgtcatgggagttttgttctcgccgcactacgggcagtcttattacgagattttctcattgggcaatgccggcggagtgattaaattcacttctttgcacaaccagccttccctccggcaaatgctctcgattgacctgccgataggatataccaagatgcgtttcagctatctggctgatttgcaacaatacaaagtaaacaatatcaaaacacatacctactctcatgtattcatggtaggatttgtgaaagacctataccgaatccgaaataaaaaaggaacagcccctctgccttcatcggtaagggcctactaagagaacgaaagatttaatgttgaaatttcaaagagcgatagataagaagaatgaaaaataagattatacaattacttttactaatctgctgcctgccggcgctgaccggttgcatcagggaagaagagtacgccaatgatcccataggtaacttcgagcaactatggaagatcattgacgaacagtattgttttctggaggcaaaaggcattgactgggatgccgtacacgaaaaataccgaaaactggtggtaccgaccatgtccaacgatgatttgtttgaccttctgagtcagatgttatataccctgaaagacgggcacgtcaatctttcttccgccaaacgcacttctttctatgatgagtggtatcaggggtatgattggaattaccgggaagacattctttaccagacctatctgggcagtgccagcagcggttactacacagcagccggactgaaatataagatattcgacaataatataggatatatccgttatgagagtttcagtgcaggggtaggaaacggtaatctggatgaggttcttctatacctgtcaccttgcaacggattaatcattgatgtacgcgacaacggagggggaaacttgacaaactccacccgtatcgccgcccggttcaccaaccaaaagacgctgaccggatacattcagcacaagaccggaccgggacataatgatttctcccaaatggaaccgatttatctggaaccgtccaacagtatccggtggcagaaaaaggtagtgatattaaccaaccgtcgttgttacagcgcaacaaacgattttgtcaatgcgatgcgcagcatagaagatacagaaattatccagttgggcgaccggaccggaggtggttccggtcttccgttctcgtccgaactgccgaacggttggagcatccgcttctccgccagcccgcatttcgataagaacaaacagccgttggaagaaggtatcgcaccggatgttgctatcaatatgtctaaggaagaccaacttgagaacaaagatacactgatagaaaaggcatttgagatactaagcgaataactttattgccgaataatttgtcaaatcagaaaatcttcctatctttgcaccgctaaacaaaaaagctacctgcggatgtggcgtaattggtagccgcgccagacttaggatctggtgccgtgaggcgtgtaggttcgagtcctatcatccgcaccaaaataaactagaaagccttcaagatacattcttggaggctttttaattgcttacaatatgaagaaacatcaactttgctgtattggtcacatcacattagataaagtagttacccctcaaagcactgtttatatgccgggaggaaccgctttttactgttcacacgccattcgtcatttcaatgatatcgactatacactagtcacggcagttggtgcaacagaaatgaacgttgtaaaacagctacgtaaggtcggcattgacgtcactgcattgcccagccggcattccgtatatttcgagaacatctacgggaccaatcccgatgaccgtacccaacgtgtactggcaaaagctgatcctttcaccgcttcccaactccgtgagatagacgcggagatttaccacctcggctccctgctggccgacgacttctcactggaagtaatcaaggagctttccctaaaaggattgattgcagtagactcacaaggttacctgcgtgaagtacgtgacactcatgtatatccgacagactggaccgacaagcgggaagccttacgatatatccatttcctgaaagtcaacgaacacgaaatggaagtgctgaccggcctttccgatcctcacgaagccgcccggcggttgcatgaatggggagtaaaagaagtgttagttacattgggaagcatgggctcacttattttcaacgggacggactttttccgtatcccggcttataagcctgcgcaagtggtggacgcgacaggctgcggcgatacatatacaatcggctatctgtatcaacgggtatccggaaccggcattgaggaggcggggcgtttcgccgctgcgatgtcgacactgaaaatcgagaaatccggtcctttcaacggcaacaaagaagatgtcgtccactgcatagagacagcggaagaaatgttttaaggtcactattgctatttcacatcggttccttttgtgttaaaatcggacattcctgtattttccaaaatcttttttgcctttcgtttgttcactttgttactttcgccaaatagcggcagaaaaagacttcaacctaaatagtaacaaatggaaaaatttaatgcaatgaggactagacttttacaacatcttcagaagaaaaccacttggtttaagagcatagtggcgctcacttgcttattgcttacctctgcatctgcctttgcacaaacaaagacggtgacgggtacggtaacagacgctgctaatgaaccactaataggcgcatcggtgctcgtacaaggaacttccaccggaaccattacagacatggacggtaagtattcaatctctgtcaccccggacgacgtactggcattttcctatgtgggaatgacctcgcagagcgtcaaggtcggtgcgcagaccgttatcaacgtcaccctgaaagaagattcgcaagtgctagccgaaacggtagttatcggatatggtagtgctaagaaaagggacttgacaggttctatcaccaacatcaaaggagaagaacttgccaacaaacctgccatgaacccgctttcttccttacagggaaaagtggccggcgtgcaaatcgtaaactccggacgtgccggctccgacccggaaattcgtattcgcggtacaaactctatcaacggatataaacctttgtatatcgttgacggactattcaacgataacatcaacttcctcaacccggaggatatcgaatccatggagattctgaaagacccgtcttcactggcgatcttcggtgtccgtggtgctaacggtgtgattatcatcaccaccaaaaaagccaaagaaggacaaacactggtaaatataaacacctccttcggcttcaagaaagtagtagataaggtgaagctggtaaacggatcgcaattccgtgagttatacagcgagcagctcgccaatcaggaagacgccccgttcgacttcaccggctggaatgcaaataccgactggcaggatgaaatcttccagacagcttttatcaccaacaataatataagcattacgggagcttcgcccaaacatagtttctatctgggcgtaggttactcgtatgaacagggcaacatcgaacatgagaaattcagcaaagtgacgattaatgcaagtaacgactacaagattacggattatctgaaagtcggcttccagttcaacggggcacgtatgcttcccgccgactccaaacaagtactgaatgccctccgtgccaccccgatcgctccggtatataatgatgaatacggactatacagtgcactgccggaatttcagaaagcacagatcaacaatccaatggtagacgtcagtctgagagcaaacaccaccaaagccgagaactaccgggcgtccggtaatatctacggtgaagtggacttcctgaaacatttcaacttcaaagcgatgttctctatggactatgcttccaataacggacggacataccagcctatcgtcaaagtgtacgaccccactgtcagcgggaatatagccaccttgggaacaggcaaaaccgaggtcagccagttcaaggaaaatgaaacgaaagtacagagtgactatgtgttgacatatacgaacagcttcgacaatggcaaccataacctgactgctactgcaggtttcacgacttattacaattccctgagccgcttggacggagcacgcaaacaaggtgtaggtctggtgattcccaacgatccggacaaatggttcgtgagtatcggtgatgcagccactgccactaatggaagcacgcagtgggaacgcagcacactgtccatgcttgcacgtgttatctacaactataaaggcaaatacctgttcaacggttcgttccgtcgcgacggttcttccgctttttcttatacgggcaacgaatggcagaacttcttctctctgggaggcggctggctgatgtccgaagaagaattcatgaaagatatcaaatggctcgatatgttgaaaatcaaggcttcttacggtacgctgggtaatcagaacctagataaagcctaccctgccgagccgttactgagcaacgcttattccgccgtattcggcaaaccgtctatcatctatccgggctatcagcttgcctatctgcccaatccgaatctccgttgggaaaaagtggaagcttgggaagccggatttgaaacgaatcttctccgcaaccgactgcattttgaaggtgtttattatatgaagaatacgaaagacctgctggccgaagttcccggtatttccggaacaattccggggataggtaacttgggacagattcagaataaaggagtagaaatggctgtgacctggcgcgaccaaatcggcgaatggggatattctgtcagtgccaacctgaccaccatcaaaaatgaagtgaagagtctggttcaggaaggatactctatcatcgccggagacaagcagcaaagttatacaatggcaggctatccgatcggttacttctacggttataaggtagaaggcgtttatcagtcgcaagccgacatagacgcatcgcccaagaacacgctcgccaccgtcacccccggtgacttgaaattcgcagatgtcgacggaaacggagaaattactccggaagaccgtaccatgataggtaatccaaccccgaaagtaacttacggtttctccctcggagtgaactacaagaactggtcgttggggatcgacatgatgggacaaggcggtaacaagatattccgcacgtgggataactataacttcgcccagttcaactacctcgaacaacggctggaccgttggcacggggaaggtacttccaatacccaaccgttgctgaactccaagcactctatcaactacctgaattcggattattacatcgaaagcggcaacttcttccgtatccgtaacgtacaacttgcctatgcattcgacaagagcctgcttgccaaaatccgcctgcaagccctgaaagtgtatgtcaacatacaaaacttgaaaacatggaagcataacaccggatatactccggaactgggaggaaccgccaccgcattcggcgtagacaacggaagctatcccgtaccggcagtctatacgttcggtatcaacctgacattctaatggcaagatagtagcgtaggggcgaaagaggagaaaccatgcaggccccttgcgaaacttcagcaactttaatctttaaaactataattgtatgaaactagataaatatatattttcaacctttattgctgcggccgcactcgctttgggcagttgcagtgactttctggaccgcagtccgcaaggacagtttacagaagacgataatcccaatgcgctggtcaacggtaaaatctacaatgtctacacgatgatgcgtagctacgatatcaccgcaggcactaccgccctcgctatccactgtctccgttccgaagacgaagaaaagggaagtattgccagtgacgggtcggatgtagccgagatgtatgacgacttcaaatacacggcctccaatggtctgctaggtgcttattggggaaagaactacgccgttatctatcagtgtaacgacatcctcgacgccattgccgagaaagaaaccgccggacagaccgaagccgaagacatcatcaacaaaggtgaagcctctttcttccgtgcctattgctacttcaacctggtaagggcattcggcgaagtccctctggtgacttacaagatcaacgacgcttcggaagccaacattccgaaaaccaccgtcgataaaatctacgagcagattgatgccgacctgaaaaccgccgaggagtcactgccggaaacatggagtaccgagtacttgggacgactgacatggggagccgcccgttctttgcacgcacgtacatatatgatgcgtaacgactggaacaatatgtacactgcctccaccgatgtcatcaagaaagggctctacaacctgagaactccgtataatgaaatcttcaccgatgatggcgaaaatagcggcggttctatcttcgaactgcaatgtaccgctactgccgcccttcctcaaagcgatattatcggcagccaattctgcgaagtgcaaggtgtgcgcggagcggaccaatgggacttgggctggggctggcacatggcaaccgaacttatggcgcaagcctacgaaccgggcgacccgcgcaagaacgccactctgctttacttccgcagatcggacagcgaaccgattactccggaaaataccaacgagccttacggcgaatctcccgtctctccggcaataggtgcttacttcaacaagaaagcctataccgaccctgccctgcgtaaagaatataccaataaaggatattgggtgaacatccgcctgatccgttatgcagatgtcttgctcatgggagccgaatccgccaacgagaagggtatctccggtgaggcaatcgactacctggaacaagtacgtgcacgtgccagaggcaccaacaccaacattcttcccaaagtgaccactaccgaccagggagaactgcgtgaagctatccgccacgaacgccgtgtggaactgggacttgagttcgaccgtttctacgacctcgtccgctggggcattgcaaaagaagtattgcaagctgccggcaaaaattatcaggacaagaacgctttacttccattgcctcagactgaaatagacaagtccaaaggggtactggtgcaaaatcccgattaccaataaaacaaaatagaatagaatataataatatgatatacaagaaactaagtttattaatcctgttctttgcgacaggactcctgaccgcatccgctcagaagtcgccacaagacatggatcgtttcatcgacgcattgatgaaaaaaatgaccaccgaagaaaagatcggtcagttgaaccttcccgtcacgggagagattactaccggacaagccaagagcagcgacatcgccggcaaaatcaagaaaggcgaagtgggaggactgttcaacctgaaaggggtggagaaaatacgtgaggtacagaaacaggctgtggaagagtcacgcctcggcattccgttgttgttcggcatggacgtgatccatggatacgaaacgatgttccctatccctctcggactctcctgtacatgggatatggcggctatcgaagaatccgcccgcattgcagccgtagaagccagcgccgacggtatctcatggacgttcagcccaatggtggatatttcgcgcgacccgcgttggggacgtgtatccgaaggtaacggtgaagatccgtttctgggagctatgattgccgaagccatggtgcgcggctatcagggcaaagatatgaaacgcaatgacgaaatcatggcttgcgtaaagcacttcgccctgtacggagcaagtgaagccggacgtgactacaatacggtggacatgagccgccaacggatgttcaacgactatatgctgccttacgaagccgccgttgaagcaggcgtaggcagtgtcatggcatcattcaacgaggtggacggcattccggccactgccaacaaatggttaatgacggacatcctgcgcggtcagtggggattcaacggatttgtagtcaccgactataccggtatttccgaaatgatagaccacggtatcggcaacctccagacggtaacggcacgtgccatcaacgccggagtggatatggatatggtcagcgaaggttttgtaggtactctgaaaaaatccattcaggaaggcaaggtttctatggaaacattgaacaccgcctgccgccgcatcctggtagcgaaatacaaactggggttgttcgacaacccgtataaatattgcgacccgaaacgtccggcacgtgacatctttacgaaggcacaccgcgacgctgcccgcagaattgcggcagaaagtttcgtcctgctcaaaaacgacagccccgacggaaatccgaacggcaaccctctgctgccttttaatcctaaaggcaacatcgccgtgataggcccgctagccaacagccgtgccaatatgcccggaacatggagcgtagccgccgtgctcgaccgttgcccttcactggtggaaggcttgaaagagatgactgccggaaaagcgaatatcatgtatgccaaaggcagcaacctgattagtgacgccgcctacgaagaacgcgccaccatgttcggccgttcactgaaccgcgacaaccggaccgaccagcaattgctggacgaagccttgaatgtagcccgccgctcggacatcatcatcgcagccttgggcgaatcgtcagaaatgagcggggaaagcagcagccgcactaacctggacctccccgacgtacaacaaaacctgttaaaagaattactgaaaaccggaaagccggtagtactggtgttattcaccggtcgtccgcttacgctaaactgggaacaggaacacgtgcccgctattctgaatgtatggttcggaggtagcgaagcggcctacgctatcggcgacgccctcttcggttatgtcaacccgggcggcaaactgacgatgactttcccgaagaacgtcggacagatccctctttattatgcgcataagaacaccggacgcccgttgggacagggtaaatggttcgagaagttccgcagcaactatctcgatgtggataacgagccactctatccgttcggttacggactttcttataccactttctcttacagcgatatcgacttgagccattccagcatggacatgaacggctcgctgaccgcagcagtgacagtcaccaacacgggcacatggcccggttcggaggtagtacagctttatatccgcgacgtcgtcggcagtagtacccgtccggtgaaagagctgaaaggttttcagaagatatttctcgaaccgggtgaaatgaagattgtccgtttcaagattgctccggaaatgttgcgatattacaattatgacctgcaactggtagcggagccgggagatttcgaagtgatgatcggcaccaacagccgggatgtgaaaacagcaagattcactttgaactaaagtaaccgtgaaaagtcggtagtaactccattctcctccttcgggaaggaggagtacccgtagggggaggtggtaggtgaatacgtaagtctattattatcagcattgtgcatccacctaccaccccggctttcagccacccctccttccccgaaggaggggaatgaagatacaaccgcctcttgccccttttacaaaccaaacttaatagtatcagttatgaaaaataaacatcatagaagaatcacaacaggaagcctactccctctcatgctactgtttctatccacccttaccctgaccttccaaagttgtaagggaaaaagcagcagcaacctcaccgccgccaccgactcactatcggatgacgccttaatggataccgttcagcgaaggactttcctttatttctgggaaggtgcagaacccaacagcggtcttgcccccgaacgttatcacgtagacggcgtatatccgcagaatgatgccaacgtggtcacctccggcggcagcggcttcggcatcatggctatccttgccggtatagaccgcggctacgtcacccgcgaagaaggattggcacgcatggaacgtatcgtctccttcctcgaaaaggccgaccgttttcacggagcttacccacactggtggtatggtgataccggaaaagtgaagccgttcggtcagaaagacaacggcggcgacctcgtagaaaccgccttcctgatgcagggccttctagccgtgcaccaatactacgcaaacggtaatgacaaagaaaaggccatagcccaacgtatcgaccgcctctggcgagaggtagactgggactggtaccgcaaaggcggacaaaacgttctttattggcattggagtcctacttacggctgggaaatggatttccccatacatggctacaacgaatgcatgattatgtatatccttgccgccgcttcaccgacgcacggagtacctgccgctgtctatcatgacggttgggcacagaacggagcgattgtttccccgcacaaggtggaaggtatagaattgcatctccgctaccagggcacggaagccggaccgcttttctgggcacaatattctttcctcggcctcgaccccgtcggactgaaagacgaatactgtcccagctacttccacgaaatgcgtaacctgacgctagttaaccgcgcctactgtatccgcaaccccaaacactataaaggtttcgggccggactgctgggggctgaccgccagttactccgtcgacggatacgccgcccactcgccgaacgagcaggacgacaaaggggtcatctcccccaccgccgcactttcgtctatcgtctacaccccggaatattctctgcaagtgatgcgccacctatataatatgggagacaaagtattcggtcctttcggattctacgatgctttcagcgaaacggacaactggtatccgcaacgctatctggctatcgaccagggacctatcgccgtcatgatcgagaattaccggacaggcctgttatggaaactctttatgagccaccccgatgtacaagccggattgacgaaactcggttttaataccaacaaacaggatgtgagacaacaataaggaatcacggtcggtggaagtggtcttactgaccacctccgccaccggcgtttcctccgcctccgccgcctttcacatcatcattactaatgcttcgggcagctttcttcacgctggctttcagttctccgatccggtagctgacactgactccaaagctacggctcggccatttgctactgctctttgacacgaagttggctccttccgtatggttgttgtagctcctgtatttttcaaagatgttattacaatataagttcacagacaaacggtcttctttcaggaacgagcggttcaggctaagaccataatattgataaccggacccctttccttgcagactgatatacggcgtacttccaccaccattcaggctcaaccgcaacttcaaaggaagcgtgtgctggatacccccgtagaaagagccattccatccatagttgtgcaatccctgcgcctcacttttcatatctgtataacttccgcgtccgttcacataaatacgtgttttcggagaagcattccagttcagataaagggaaagaccggtattccggttcttgcctatattatcataggtgctgtataaagccccgtgcggtgctatatgaccgccgccaaagtcttccccgtcctcggcagtaatcaaacggctgattctctcgattccattattattaaaggagtgacgcaatgagacattcacgttaaacttagcactgaaactgctgtaagccacatcgaacgcatgacttttctcactcttcaaatccggattaccctgactgataaacatcgggttctgatcgtcaaaataagggttcaggttccagatacccggacgccagatacgcatattataaccggcacgtatgttctgcgttttcccgatcttcatccccaaagagacggaaggcaccaagtcactgaaattggtatggaaattctctcccggaccgacaatatatttcacccgttgtatggtctgttcgtagcggagtcccggtttgaaagtaaagtccttatatctcaacgtatatccggcataggcggacaggatatggttcaaatgacggtaatcgctgctgcggtcctcgttgtatgcataatcattgctgcctcctgctgcctcgtaaaacttattatcactggagttccgccggaagatatacttcacgccggtttcaatcgtatgcaatttgccgatcggtgtcgtataatccacctgaaaggtctgttccatagtattcgtcttaccgtccgaatggtaattgtacaacttcagattttctatcaattcatcttttctttcatccggaagaatatcgagataagtgctataagaatcactcgtctgaggttgtgtgttcaccttataagaaagcgtaatcatccgttgtttgttcttcttggaagtacgctgataatcaacgtttccatttatggagaaccacgaactttttccatgattgtccgtccggtagctataagcaacatcctcgtaatttgctccgtacatcacggtactaccgtcgctgttactcttattattgctgccatacatcccgaaagccaccgtcagcaaccgtaacgtatcaatctcgtaactcgcctcaagattcccgtactggaaattcccctttgacttggaactgctgccggactcaagatatttctccgtatccgactcaaagttctcacgataactgtccgaatagccgcgcgggctgttattataattaaagttataattggcggaaagggttagtttcccctgtttcaccattgcataagcaccggtacctgccccgttattgttcgcgcttccacggaaagtagccgtatatccttcaaatccgctgcccactgtcacgatattcaggataccgcccactccttccgcatcatatttagctcccggtgaagtgataacctcaatatatttaatcgaattggcaggcatacttttcaacacttccttcgggttattgctcatcatgttattgggttttccgttcacgtgtaccttgaaactgctgcttccgttcacctgtatattatcttccccgtccaccgtcaccaaaggaactttacgcaacatttccaatatactgttggacttggaatcgggatcatcctcaatattatactctatcttatcgacatctacctttaccagaggcttttgtgccacgacttccacccctttcagctcattgttggcttccgccgagagcattgtccccaaatcaaccaccttagttgacgatttcaacgtaaattccttcaccacaggcgctttacctatcgaagaaatactgattacataatctcctgccggcacattcagcttctcctgaaatttaccgttcgcaccggtcaccgccattttcagcgctttctccggagcatttttctttgtaattctgattgtagcatacggttccccttcctgcgtcaaagaatccagaagcacacctttgattgtataagaaggagccacggatttttgcgcccaccccgccacagatgcagtgaacacgaatagtaatagtagcaacagtctgtgtttcataactagaatgatttagttcttattttattagacgtgcaacatttcggaatgttgcaaatttgggggataaaagtaggtggtttcccaacagttacgaaacattcggagttaagaaagaaaaaagaatagataaaaaatattatacgctctatttatttcagccccgtccaatgcttcacgcctgacaacaactgcttcaaattgttccataatctatctacccaactgatatgaaaaggcttttcgtatttcgtaagcaccttcgcacagtcctgcatccgttcgccttgtcctttcatggctatctgtatctcattcattcgagcgattttttccctctgcaacagcacttccttatcctgagcacctataatttcggcaagtagaaatatggaaataaatacaagaaattccgtatattccaactactctctacaaagggaaaaatgcaaattctctttcaacctatcaccacccttctgaaaccctttacagatcgtacttacagaacggtgataggttgtcagtaacctatcaccttacctatcacctatcaccgcccaatttgataaatgcctcttgtaaacaagagtaccactcagaggtaacttccgtttcatgccttgttacaatttgtttcaaggcgaagaaactttagtttcaagctgccggaactaaagtttcaagctattgaaaccagagtttcaaggtgcagaaactagagtttctcaccgatgaaaccgatcgtttccccgtatggaacaggcagcaaaaaggcatataaaacttaaccaagttttagtgataaataaatacgaaagagtttgcccgaccggattataaagcctacctttatcagcctttaataaaaaaggaataaataataaacacacttgacatgaaacttactttgatgcgggacaacagcgggacattaaccatgcgaacgctagatattaccctacaaatagaagcgatgaagcatgaaacgaaagcccgcccgatcagtaatctacggacaagcatacgtcacgcatcaccggactgcaaactagaagaagcgcaaaaactgacgaaagtcatccctgccgccaacttccgcaaaacaaccaacgggacacaaatgaccgcatacaacggcatcgtgcaaatagaagtaaaccacctggcaaacaggacggaagtaaaccgtgtgaaacaggaagcagcagaactcacccaaaccctcgcagccttcatgggttccagcggacactccgtaaaaatatggctgcgtttcacacgcccggacaaatcactacccaaaagccgggaagaagcggaaatattccaagctcacgcttacagaaaagccgtcggcctgtgtcaaccggcactctcctatgccatcgaacttaaaaaaccgacattggatcaattctgccggcaaacctacgatccggaactttattacaatcccgactctaccgtcatttatatgcgccaaccattagaaatgccgtcggacaccacctacaaagaaaccgtgcaagcggaaaactccccattcaaacggctgattccgggatacgacagtttcgacaccttatccgcccttttcgaggtcgccctgaataaggcttaccgttcattaagcgaacttcatcccaacgtacatctccattcggacgatgacctcaagcctctcttagtgcaacttgcggaaaactgctttcagtcaggcataccggaagaggaaaccgcccgttgggccattgcacacttctacacccaaaagaaggaattcctgatccgccaaaccgtacaaaatgtatatctgaacgccaaaggtttcggaaaaaaatcccccttatcagccgaacaggaactggaactccggacagaagaatttatgcaacgccgatacgagtttcgttacaacacgatgacaaccgtcaccgaatatcgcgaacgaaacacgttctgtttttgcttccgtccggtcaccaaccgcacgcgcaacagcatcgccatgaacgcacgactcgaaggactcaacctttgggacagggatgttgcccgttatctggactccgaccgtattccggttttcaaccctatcgaagatttccttttcagcgtggatatccgttgggacggtcgcgaccgcatccgcgagcttgcttcccgtgttccttgcaacaacatccactggcctgatctgttttatcgctggttcctgaatatggtggctcattggcgccacactgaccgcaactacgcaaattgcacggtaccgttgttagtcggtccgcaagcttaccggaaatccactttctgccggaatctgctaccgaccgaattgcaaccctactacaccgaccgcattgacttcagcaacaaaagggatgccgaactatctctcaaccgtttcgcactcatcaacatggacgagttcgaccaaaacagggagagtcaacaggctttcctgaaacatatcattcaaaaaccggtagtcaatacccgccgtcctcacggtgtagcaacacaggagttacgccgctatgcctcattcatcggcacaagcaatcacaaggatttactgaccgacacttccggcagccgacgttatatcgtcatcgccgtaaccggtccgatcgattgttctcctatcgactatgaacaactttacgcgcaagccatacacgatatttacaaaggagaacgttattggttcaatgccgaagatgaaaaggttatgaccgaaagcaatcaggagtttcaagtgatccccattgcagagcaattattccaccaatatttccgagctgcccgggaagatgaggaagaatacgagttacttctcgccatcgagatactggaacaggtgcaacatgatagtagaatccgcgtttccaattgcaacattatccagtttggaagaatattgcagaggaatcaagtgccttccatacacgccaagcgcggcaatgtctataaagttgtccgaatcaagccgaaaagagcataaatatacaattatcggtacggtgacaggtgaaggatacggtgataggttaacgacaacctatcaccgttctgtaagtacgatctgtaaagggtttcagaagggtggtgataggttgaaagaggaattggaaaaatcaataggaattgcgaacagtgcccaacagtcactattcttcagcaataacccagtctccgatagttcttgtcgtactgtcgaagttgactcctatctttacaacacttcgatgatccggctgataaggtatagcatatcctttactgtttatttgttccaacgcttcttccggtgtaccatctaccttgaactcaaagacataaatagcatcatgtaattttacaactacgtcagcccgtccgatagcactttttacttccacatccacgtattggcccatcaagcggaataaaagatagaagatagtctgataatgtttttcctgcttattctccagatcattgggaatcgaagcgaagaaagcccttattctctccagacattcaaccagttttccggcacgcaagtctttgataaaagaaaccacataaaacgtattttcacgtgccggcaaatgtacgtaggcgggcataagagactcgataaatcctttccgcacttctttgttgggataagccaaagtataaagttggaattccgaatcgtagcccttgatagtaagatagccactttgataaagcacagggagaggatcagtgataacacttgtaggagcatcaaactgttcggcagtagccgtagtcccatccaattcgcggatatcgaaattactctgctgcaatatgtttatcaagaaagtaggtgttccggtagaaaaccagaaattagcatactttttttgagcaaatgcgttgaacaagctaaatggattgtaaatatcttcactatgttcactaaaatgatacccgtcatactgctgtttcaagtgcaaacaggcctcctcataggtttcgccattagcctgtgccatcatctcaatatctgctttcagttgcgtacgtaattcctgctcggtaataccacaaattgcgctataatcatcccgcatgctgatattctgcaaattattcagttcactgaaaatactcatttgactgaatttgctgattcccgtcaagaaaaggaaacgaagatattctccttgtgcctttaaaggactaaagaatttccgcatttcttcacgtaattcattttgcagttccggcaaatggttactatctaataaaggtgcatcatattcgtcaataagcactactacctgcaaaccggtttgctgatatgctctttttattatcccggaaaaacgggctgcatagccctcctcttccggagcgctcccataaattcgctcccactcacaaagttgaagattcaaacgttcgttcagatcagccatagtggtatatttcgtcatgctgaaatctatgtgcagcaccggatagacattccattctttctccaaacgttccattgccaatccttggaacaagtcttttcttccccgaaaataagcgtccaaagtggaaaccagcaaacttttcccgaagcggcggggacgacttaaaaaataaaccttattggtattagccaaccgatatatcaactccgtcttgtcaacgtatacgttgttattattacgcaagtcttcaaaattctgtatccctatcgggtatattctaaaagtattattcataatgcctatcctctctaaaatgaaatatagacaaatataggtattaaaagacaaacatcaaacagtactatacattttctcaaatcttatcggcatttacaaccataagacaggaaggacacccgactattatctcataacaatacccgaaccattgctattattttacataagcatacatttatattcctacggagttgtaacaagcagttattctttttagtattattacaaaccttcctatttatttttttattttttattaacccctacatactattacactccttaacagtatcaacttgtaaagctgtaactcaaatttaaccttattgtaacacaaaaatagtggcacaaagctttgttagtttcgtaaaataaaatatctttgtttgctaattacttaaatcgaaacgtatgataacaaacaattcacaagaaatattaactatttatttaaaaacgctaatgaaaaatctaacttttctcaaactgttcgttacgacgatgtttgtaatggctacagcattatttgcaggttgcgttgacgataacgacgacactgaagctccacgtttggaggtttctccaaaaacgttagtatttgataccgacggaaccccggtagagggaagtcaatcttattttgaaatttcagcaaaccgtcactggacagcaactgtactggacgataaaacctgggtgacactttccaaaatggaaggtgacggttctgacaaagttcaggtgagtatccccgaaggtattacagacgaagcgaaagtcctgattcagatttctaacaaggtaggagtgctgatgaaagaggaagttacgattagaagcggaaacattgttccggaagttgctatttataaagaaacattcggaactgcagaacaaatagataaacaatggcctctggtcgctgacttcaatggttgggtcaaatcaggggaaggttcaaccaatgtaagttatgaaagctcaggcaatgtatctttacgcgaatccggaaaactaagtgcaggatatgaaggtgcttccggtaatgccaaagtgttctttggaactaagagcccaatcttcataattaaagagattacattgaagcctgaccagacaaacctcaagctaggatttggagcaagctattccaagagtataaacggaggaaattatgacaatacatttaagcccgaaagtttccatttctacctaagtaaggatggcataacttggtcaagcgctatccaatatgattacaagcaggcagacgaattctgggtttatgtaacttctaactttacactgaaacaagcagtgaatactctttatattaagtttgctgcggatattgagtcaggttttgcaatagatgatgtaaaactctccaccggcaatggcggacaagaaattgatttaggtggcggtagcgaaccggaagaacctgcaacagaaattacaatcccagccattattgagatgatgtctactgaaggaactgttattgatgccaatgccgatcgctactttgaagcggttgtacaaaatgatattgaaaacgggaattatgtaaataagaacctcgttcttgcaacaaaaaatgctacaacaagcggaaatggcgttatgctatacggaaaccttgctgatccaaaggaacttggagtcacaaaaggagacatagttaaagttactcttaaaaaaggactcgcaaaagctcaactttataataaactttatgaagtgactggagggcagaatgacgtttgggcaactatagaaaaaactggcaataaagctactattaacccaattacaatcgaagcaactcagttgctagattatcaaagtatgactgtcaaaatagagaatgcaaatcctaaagtatcaggagtatggggtgtggccccaggaaccgtcatatttactgctgcaggaaccgactttactgtatttacaaaaacaggtgccactggattcgtaaaccaaccattcaagccagtagataatggtggaactgtaacaggagtagttactttatataatggtaatccccaacttgcaccacaaagtttagatgatgtcgcagcattcaaatccacagatccaactattgtttcagccaatcctaaatcaatagacttccctaatgaaggaggtgctgaagatatagaagttacagttgtaaattctggagataaaacattgcagataaacggattatcaaatcctttatctgcaaagattgaagggactaaaattacagttactgcagcagctaatccaaagaatagtgtagaatcacaaactttgaaaatatcaatagagggaggtaatgaaatagaagtacccattacaatcgcagctaaaccttccggaaatgagactattatcaatttggatttaacaacagccgataattacccagacaattttcctgttggttccaaagaaaagaaaacagaagcagctctattcaaatttggagaatatgaatatacagtctcaccttccacttccggaggatattatcaaatagcaaatagtggcaaagtttatatcttttttgggaaaaaagaagcatatattgaacttccttctattccaaataaaaaattgactaaagtcacactcacaagtcatactggagctgctaaagctactaaagtaggaattacagatacaaataataatatagtaaaaggtggggaggccattgctaaagatgaaaaccatgtatttacatacaatttatcaggaacaataatagatactaaatatagaatttatattgcaagtgatgccaatgctcagttaggtgggtggacacttgtatatgaataacttattatacgaaaccaatattcttggcaagattattttagtcttgccaagagttaatcaaaattcaaatgacatcaccttccaaatactacgcagcagcaataaagtccgtattctttacggtgctgatactgtgtgcatttgcgtgtagcaataacgacgacccggtatccccgaccgaagacggagaagcatattggaaaatatcttcgaccgtgaaatcagtttccggatcatcagcaatcattctatccggtaaaaccggtacggaatggcacgcagaagtgaccgaaggaacagaatggtgttctttcagtagtaaagattataatataacgaccaaaagtggacagatagcagatggactcaatgtactatacgtatattataagaccaattctggaaaaactcaacgaagagcacaactaacgttgcgttttgcagagaatgctcaaaagacttttgatctggtacagctagcagaatcccaagagaatctgccggcgtttaactcatgggctgagctacctactaaagtagaaaatactaactatcaatatgttactcactatggactcttaaacaatcaaacaattcgtaactattcgatttgtttcgataaaactaagaaagccgctttatgggtagcatatccgatacatgacgcctacttaagaaagaatgtagaacgtaccaatcgttgggctttcgaccctattgttcctcaaagtttccaggcaaattgtgtagagcattcttataaaggtagttatgaccgtggtcatcagatagcatctgccgaccgcgtgtgtacagatgaaatgaatgcgcagacattctatatgtcgaatatgacaccacagcttggttccctgaaccaacagatgtgggcgactcttgaaggaaaagtccgcagttacagttgtagtgatacattgtatgtagtgaccggagcttatttcggtcccggagcaactacaaccacagacggcgtaggtagttccgtacccgttcctacaaactatttcaaagtactgctacgcacaaaaagcggttctacgaataaaaaggtgcaggattgctcacccaacgaattaatatctattggtttctgggtagaacaaaaaggctatggaaattctataccggaaagtatttgcacaacagtagctgatattgaagaaaaaacaggttttacattcttccccaaagtagatagttctgtgaagcaacagaaggaacccgcccaatggggaataaaatgagatacaagcttatgaagaaacaattattttgcaccatattctttgtactgctgatttccgtttgttttggtcagaaaccatacaaagtggtattctataatctcgaaaacttcttcgatacgatcaatgatcccgaagttaaagatgacgagtttacccccgaaggacccaaaaaatggaatacagccaagtataataaaaagcttggcaatatcgaacgagtattgttcggtatggcagctatcgacaaagagtatccaatcgttatcggagtatcggaagtagaaaaccggaacgtactggaagacattgtagctacccccaagctggcaccgggtaattatcggatctcacatttcgattcacccgaagcccgtggagtagacgtagctttcctctaccgtccggatgtattcaaattggaaggacaatatcctgtaaagaccgttattccttcattgccggacttcaagactcgcgatatcctgactatgtgggggaccatagaagacgaaccgttcttctttatggtagctcactggccctctcgcctgggaggaaaagatgtttcagagttcaaacgtattgcggtcggacgccagatgcgcagcatcgcagactctgtactgcaggccaacccggcaactaaaatagtgatgatgggtgacttcaatgatgatccgacagacaaaagtataaccgaagggttaggagctaaattaaaaatgaaagatttgtctgccggtgatttatacgccccgtatgccgatatgctgaaagccggttacggtacattagcttacggtgatgcgtggaacatatttgataatattgttatatctgaaaatcttgccaaaggatctaccggaaaactgaaaatacaaaaagctcccggatcaaaattctacggcaatatcttcaaacaacattatatgatacaaaaagagggacaatacaaggggtatccactacgtacctatgtcggaaataatttccaaggtggattcagcgaccatttccctgtatatatctatataagcaaataaaactgaaatacttatgaaaataaagagttttctaatcatggtattatctttgatttcgctgactgtcgctgcacagaacggcggaatcaagggtaaagtcgtatcacgtgccacgcgtacggctattgacggtgtgaaagtcactttaacaccgggcaacgtcacaacgacaactgacgaaaaaggtaacttcatatttgagaatttgaataaaggtgaatattcactggcttttgaagcggcagaatatgagccattgtccattgcggtccgggtagacaaactgataagggacattaacaatgtagtgttagtacccgacaatcaatctcctactgtggacgatgctatttttgcagaatttgatacggagactttggacgatgcccaatcattgccttcatcactgtcggcatccaaagatgtattcaacaacatcgcttcctacaaattcagcgagatgcgtttcaaccttcgcggatacgactcacgctatactgatgtatacttgaacggtatcctgttcaatgatgcactgaccggatattctccttggtcattatggagcgggttaaacgacgctacccgtaatcaggaagttacttcaggattgaatatgggagaaatgggtattggtagcctcggcggtacaaccaacatcaatacgcgtccttcacaaatgcgtaaaggattccgtgccagtcttgtaaatggcaactcaacataccgtttccgtggtatggtgacgtatgcctcaggactgcaagataatggttggtcatacgccttctccgtttcaacccgacagggaggtaactcttacgctcgtggtgtatattacaatgcattcggatatttcgctgccgtagaaaaacaattcaacgaccaacaccgtttggctttgagcgtattaggtgctccgacagaaagaggtactcaacaagctgccactcaggaagtgtatgatctagtcggaaacaactattacaacccgaactggggttggcaaagcggtaaacgccgtaatgcacgtgtacgtaattatcacgagcctatcgctgtattgaattacacttatgacatcaacgaccgttcacaactgaacgtggctacttccgtacgcttcggagagaacggttattcggcacttacctggtatgccggtcccgacccacgccccgactattacagatatttgcccagctactctaacgggactacttacggtgcctggttagatgaagcatggcgtgccaatacggataatatccggcacattaattggggacaactgtatgacatcaaccgtaatcaggaagaaaatgcaacgtatggtccgggacaccgttctatcaatatgatagaagaacgccataccgaccagttggactggaacttctatacacagttctctcatacgttccgcaataattccagaataaacggaggagtaaatttacgccgtaaccgtacggagtattatagcgaagtgaaggacctgctcggtggcgattactgggtagacatcgacaaatttgccgaacgtgacatgggcggattaaatccgattccttatcagaacgacatggaatattatgaaaaatacggtcatgcacgtgctgccaaaaaaggagataaatacggatatgattactacggaaatgtactcaacgcacgcgcatgggctcagtatgaaatgagtttcggcaaactgggtgtcaacctgggcggcgagatcggtcatgcttctttatggcgtcacgggttatggaagaaaggtttgttcctggatgactctcaaggcgactctaagaaacttaattatctgacttataaattaaaagccaacttcagctataaattctcggcagcgcactctatcgaggctaatatcatgtatatgcaagattcgccggaatttcagtccgcatttgtatcaccgcgtacacgtaacgccgttactccgggactttccgcagaaaaagtattcggtgtagacggttcctataatttccgtttaggagaacttagggcacgtgtatccggctattataccaagtttatgaatcagaacaaggttctttcttactatgacgacgtagaagccactttctccaactttgcgatgagcggcattgacaaacgtcattttggtgtggaggttgctgcttctattccgctcgacgccggattctatctgaacggtgcacttagctggggacaatatacatacgattcgaatcccaactacgttcagatacaggataatagtggtgagatcaaaaacgaaggtaaggtatactggaaaaacttccgcgtagaaagtactccgcagaaagcaatgaatatcggtttgtcttatcgtggtcccaagaatatctatgcttcactggatttgaattattacagcaatatgtacatatccatgagtccgctgtatcgtacagatgcggtattgactccgggtatgacaaaagaagatgttgcagaactccgtagccaagagaaattcaactctgcctatgtagtaaatgccagcattggtaagaactggtttatcaagcgccagtacactcttggattcagcctggaaatgaagaatcttctcaacgaccaggacatcaagaccggtggttacgaacaggttcgtttgttgaagaacaaagatacaagttaccaaacttatcagccatttgactccaaatatttctatatgtttggttcgacttactatctgaatctttatttccgcttctaatctgtaacgaataaaaatgagaactatgagcaaattattaaaaatatgtatggttgtagccgctgtactcagttttaccggttgctacaatgactttgatgatcctgcaccggctaaagtctggacagaggcagatttcaacaaagaccaaatcattacaatcaaacagttgaaagatatatattatgccaaatacgctccgggatcaactgccggacttggcaaatatgtagaaatcacagaggattatgtaatccgtggtaaagtaatatcaagcgaccaggccgggaacgtttataaatctctttatatctatgacgagacttcccaatccggcatcgaactaaagctaatggtcagcaactatgtgtattatcacatgggacagactatttatgtgaagaccaaaggaatggctctcggcaactaccggtatatgattagtctcggtatgccgcctacggaagcggatattgagaaaaactatgcaaaccgcaatctggaaaaccaactgttgataaacgaacatatctgcccgggtgctatgggagaactgacggagaatgatgttttagttattactccaagcaactatgaaacagcactcaacgacgatgcgctgggacgcctggttcgtttcgaaggattaacctataaagaaggtacatccggtaacaacttctatccttcctatctggaggctatttatgagaatggtaaaaccgaggctacatacactagcaagtcttatatatccgaaggattaacacccacgtatgcatatagctataataaccaacgttattatggttcggcatggttctcttatggcggtacaaccaccgaagataagggtaactacattgtacgtgtaagcggatattcaaacttcgccctacaaccattgcccgaagccggtgcaacgggagatataacagccatttatacaaaatactcttccagttcaggcggtttcatcacttaccagttactggtgaacagttttaatgacattaatttctaagtataagatacacattaaacccaaaaggagaaaacgatcattgttttctccttttttcattttattattccgtactaccgtaagtatctttcttaaagatagaagaacagcaacaacacaaaattacaggcaatcactaccccgaatccccctaaaatccagggacggagcttacttcccttcccggcgaagaacaaagcatagaacatattcaccattatattactgatgatagcctgcatactgcaagcagtaataatcagtgcggcaacgctaccggtattttgcaacaagttcaagataaaaggagtaatatcactaaagccggatacaaaagaaagcagattcaatccacctgtacctgcgtagactaacgtataatgagtcagcacagtaaagattacaaataatacggcaaagattagggcaaccttaaattccagcgggttactgctatcatcatcttccggttcggcatccgaatctttaggacgtttctgccgggaatgaataaaccaccctacagccgcagctatcaccgacataatcagcaagtacggataaatagactggaaaatctcccggctaaaaatcagtatcagtatcataaaacgcaggaacatcatactgacagcaaacagcatggcggcaacatagtcggtagcttcctgctccgacgctttccgacttttacgggcaagtaccgagatcgtagccgtactgctatacagccctccgataatgccggataccaaagtgcctgactcatggaatacatatcttttcagcagataagacagatacgagatgccggataccacaaccgttgccagccaaatggaataaggagtaagattgatatcaggaatcaggttcttgttcggcaacataggcaatatgataccactgatagcaaggaatttcgccagcgtaatcatttcatcattcttcatacgctgagcaaattcggtaaacgtatgtttcagttcggtcaaaagaagcaccgtcacaatcaccatgacgtaaaaccaggaaggttgagtggctacgataggagccatgcaataggtaatcaacgcaataataatggtagtaacaccaaaaacatgaaactgagactgcttgacgtaatagttcagtcccaacaacaatcccaacactgcaccgcctcccataaacagacgcatatcggtagggtcgagtatatagagcagataccccaagattccgataaaagtaaatgtacggtcggtcccgaaaagggtagtttcaccctcacgcttcaaactgattcggcgctgcgaaagcccgattagtaaagaaaacaaggtcaccagaacgaaagtgaccaattcccgcggcagatagttgtacaactgttccatatccatacattgctcttttagaataggaacaaatatacggtttatttgttaacgttcaccacgttttatacggttttttcattagttgggagttgtagtaacgcacatctccggtcacttccttaccgatgaagtccggtttcacaaaagattcctcttccgattccagttcgacttccgccacgacaagtccttcattctcaccataaaactcgtcaacttcgaatacatgcttaccgcttcgtaccaagtaacgggtcttatcaatgataccgggttcacaaagtttcatcagttcttccgcttccgccaaaggaagctccttctcccattcataacggctggttccggaagcattggaagctcctttaatggtaagataccccttatcgtcacgaatacggacccgtacagtcctcccacgagcactgctgatatacccttgtacaatccggctatgcgaggttgccagagatttaaactcaccggagactaaaaactttcgttctatttcttgtgccatggcacaaaagtaatgaaattccttaaaatctcgtcataaactcaatgacgattttatcccgttccgactctttagggatacccgatttcttgtagaagtacttctcgaagttcagacggagatcggcaataaaagccttggagagactaagcgtaatcccgcctgtcacacggtgacgggcatagtcatttataatcaacgtttttgttgtctcgtcaatcgtaccattgctatggtccgtcatcatatcataacgggccaggaaagatattttattaaaaaccttcttcagcggcaagtcataattgacaaagctgttaactgcatgaacatctttaaacgcattatgcccatacattttatacaggtattccgcctcaatatggaaacgattgttctgataatagataccggcatcatacatattgattcgtacatcttccggttttatcatttgagtgctaagtgtcacattccagttcttgccgggcagtaactgcgcctttatagaataattcagtgttttgtgccattctttctggtttgtcaaaccggaaccgttgaacagtccaccttccagaataaacgggaaatctcctttatgtgtataggcagaagtaagtccgacatcacgcacattacccacctgcttggcaataaatgaacggttagcgaaatactgttggtgcggtgaacggtgtgcatctatcgtgaaaggaacacgcatctgcccaattgtaaaattcaggtctttcaccggaaagacacgtgcgtacgcatcaagcattttgatagagccttcatcggaaaggtcgatttctgccttataagcaaccagcggatgtacatttcccgaaacactgaaacgggcattgcgtacctcaaaacggctttcgcctgtttctgtctgatattcatatttgccccggatcgttccgtggatttccggcagataatcctttatctccattgtctgcttatccagtttcttgccatctccggcatcatccttggcctgtccaaaggctgctgtcgttagcaaaagtgtaacgacggttgttgtaattctactcatttcagttgtttgctactatattcgcggcaaaagtacaactgtgaagatacaccggaatgacaaaccggctacggaagaattacagaaaagttacattgatattacaggggttacaaaagcgttacaaaacaagaattcaccacagatcacatgattttcaccgtccgggcagaccttcttttcgtgccccttgtgcaatctatgtaatctgtagtgaatcaatcaaccgaaaaaggagaatgcaaccaacattaccaatgccaaaataattaatgagacgaacactattttgactaccttttgggcttgttgttcttccttcttactaatcgctgtttttttcttagccttacccataatagttagttttaaagttcaacactaacaaagtaagaacaaatcttttaactttccaaaaataacacttgctaattttgttttttatgattcctgcgaagaaaactccatcaggtaagccttgataaagccatcgatcttaccgtccattactccgttcacatccgaagtctgatagttggtacgatgatcctttacacggcggtcatcaaatacatagcttcggatttgcgacccccattcaatcttcatcttaccggcttccacctttgcctgttccgccatacgatgctgcaattccttatcatacaagatagagcgtaactgacgcattgcattttcacggttcttcggctggtcgcgggtttcggtattctcaatcaggatttcctcttcttcgcccgtataagggtctttatactgataacgcaaacggacaccggattctaccttgttcacattctgaccaccggcaccaccgcttcggaatgtatcccaggaaatacgtgctgtttctatattcacctcgatactgtcgtctaccagcggagtcacaaatacggaagcaaaagaagtcatacgcttaccttgtgcattgtacggagagacacgaaccaaccgatgcacgccgttctcacctttcagataaccgtaagcaaaatctccttcgatattgatcgtacaagttttgattcccgcctcatcaccttcctgaaggttggcaatcgtagccttataaccatttgtctcggcatagcgcagatacatacgcatcaacatggatgcccagtcctgactttccgtaccaccggcaccggaattgattttcaacacacaatccatctggtcggcttcgtcacgaagcatattcttgagttcaagtgcttccaccgcctcactggctttcgcataagcggcatctacatcttcctctgtcaccagttcttctttatagaaatcaaatgccagttccagctcgtctgccagtgtcttcacctcattataaccgctaatccacttctgcagatcctttaccaacttcatttgagcttccgcccgtttctggtcgtcccagaatcccggagcttgtgtccttaattgttcttcttcgacttgaattttcttcccgtcgatgtcaaagatacctcctcagcgcatctgtgcgctctttcacgtctttaagttgttcaatagtaatcatctgatttacaattttattagttatattttttcaaatccggcgacaaagatacgaaaaagcctgcttactcctcatacatcttttcaatcaactcgctataattctgcgctacaaccgcccgtttcaatttcagcgtgttggtcagttcgccacgttccatgctgaatggttcgggaagcagagtgaagcgcttgatttgctcgtaatgagcaaactgctgttgcaacgtttctatccgggcacggaaaagaccgacaatcttcggatgttgcagcagttcggccatatctttatactcaatgcctttctccttagcatattccttcacgtatccatacacaggaacaataagggcagaaacaaacttacgctgatcggcaataatagcaatctgatcgatataacggtcaatcaccagttttgtttccaacgcttgcggagcgatatatttgccgttcgatgttttgaacaggtctttgatacgttccgtcaggaaaagctgtccattcttaaagtaacctgcatcccccgtgtggaaccagccgtcggggtcaatagcggcagcagtggcttccgctttcttataatatcctttcgtgatcgtcttaccacgaagcagtatttcattgtcttcgcctatcttcacttcaactcccggcagtacgacacccaccgaaccgatgtcatagcccaccggcaacgtacaggatacagtagccgtagattccgtcaagccgtatccaaccaccatattgatgcctaccgaatgaacaaattcattgatctcatcgggaacggcagcaccggcagtcgggaaaaagtttccattctcaatgccgatcgtcttcttcagtaaagaatagatcgttttttcgtagaacttatatttcagctgattcatcaccggaggtgttttcccccggcgcagataatccagattatggattctacccactttgatagcatccagcatcaacgccttctttaaaccggttgtctcattgatcttctcctgtacgcctgcatataccttttcccagaaacggggaacactgcacatcaacgtcggccggatctccttgatagtcgtctgaatatctgccggacgaagattgatacaaatctgcacgcctttatgaatacaaaggtaacaccacgctttctcgaatacgtgcgtcagtggcaggaagttcatggatacatccttatccgacattgtcgtcaggcggtcgtcatgtgtatggaactgttccagatagcaggaatgatgcagcatgactcctttcggttcgcccgttgttccggacgtataaaggatattcgccaaatcatcgtaagaagcgcgttccgtacgtgcttccaccgtatcattatgcgggagtccctcccccattgccataaattcatcaaagtagatagaagatacatcacgagggtctttcaccaccgaacggtcaaagataatcagttgttgcagggaagaacagaaaccgaaaatgctgaaagcagcatcatattgaaactgttcccccacaaaaaggtaacgaatctgcgcatcattgatgatgtattgcgcttgcgcaggcgaactggtcgcataaaacggaatggtaacagcgcgattggcaaatgcaccaaagtcaacatagaaccattcgggcttattctgtgaaaatataccgatattctcttgttcttccactcccaacgccacgaaagcattagctgcttgtcgtacagttcccgagaactgattccacgaaataggaatccattgagctgtctcatagtcgcggtattttaaggctaccttgtcgccatatttttcggcctgacgatggaccaggacagataaatgatgataagtcatactctttgtattagtaaatatggtacaaaggtattagttttatctcatttagacaaaattagtcagaagttttacaatgggtattgaaaatcagtgttttgtttgagaatagaaccagttttaaccctaaaaactaaccataattattaatcataaaaagacactagtatcccattaaaactaggacgaattagaattaaataaatttggtccatttggtctgaaccgttccttgtcattttgaaatttagttttatcagtcaaagaaatactcaatatctgaaacacactacttttgcgttgcaattcaaacattatattattgcttaattacttttacacaaaaaagtcgttttacgcaattatttcaaataaaatcaataaatcagtacttatacactgattattagccgtttagttttaaaaaagtattgaaagctttctttttttgaatgttttcttatgaaaaggttgtcgataaattatttaataattaattttgttggagggttttatattttacttgttaatctaaatggatacacatgatgattatcacacgaatggaagataaagttcttcgttttaaaaagttttttgatctgaattttcccaaagtaaaaactttcgcatggcaattattaaaatcagaagaagatgcagaagatattgctcaggatattttcgttaagttatgggagaaaccggatttatggttagaacgtgaaaaattggacagttatttatatacagttgtacgaaaccatatctataatttcttgaaacacaaggctgttgaatatgactacttggatgttgcagcagaaaaaatgcaagtggcggaacggggattgcctacgccggatgatgaattttgcgctcatgaacttgaactttttgttcagatggctcttgaacgtatgccggaacagcgcaggcgtatttttttaatgagcagggaagagggaatgacctcaccggaaattgcagcgaaattgaatatttcggttcgtacagttgaacaacatatctataaagcccttcaagatctaaaaaaaatcgttttatttttattttttttctatctagactaagtatgtatgcccggcaagttgtctcttatatgtaacacttgagttggtttagatgaaaaataaattagaaaaacagctacgttcttttattgactttgattattcaaagcgaacgatcgacaggtttcatcgttggatgattagttctgattctgccgaagagaaagagacagcacttcgtaatctatggttcaagacaaaaggaaaggctgagcacgatatggagtattcgtttcggcaggtattggataaaatcggaattgaatacactccaatggttacagatgtaaatcgctggaatttgtggaaatctgttgcggcagctgctgttattgtcgttctatctgtgacagctactttgtggataagctacaatcattttgacagagacaacattgcaatggtggaacattatgtgaataatggaaccagagagacaatcagcctgccggacgggactaccgtacatctgaactccggttcacacgtgttttatcctgaaaatctcgagggcaaaacccgaacgatttatttgataggagaggctgagtttaaggtagcaagaaatccgaagaaacctttcatcgtgcgatcatcaaacatggcgataactgctttgggaacagagtttaatgtgaaagcttatccggaagaagatgtaataactgcttctttgatcgaaggaaaagtacgagtagattgtaatgatacgattagttatgttttaactcccggttatcaggttgtgtataacaaatgtacggatgactgccaaatgctgactgcaaacatgaaagatgtgacggcatggatgcggggagaacttgtgttcgataaggttactctcaccgaaattgtgcggacgttggaacgtcattatggaatcacattccatatctcaacaaagaaatccaatcaagatcgttataattttgtttttagaaaagatgccactttagaagaaacattggaagtgatgaaggttgtcattggtcaattcgattatcgattggaagacagtatctgctatattatctggtagagaaaaacaataaatatttttttgttaaacttaaaatctaatatgcttatgtagaaaaatatccggaagaggctccaccctctccggatatgaaataatttttagccttaaaacaaataagcaacttgttgcttatttaagaaatgagaaaaaatacatgatttaaaactaaaaacgtcgtaaagatatgaatttatatctggaaaacactggaaaaggtatattaataacttttctactattaatcgggtcaatgctttatgcccaaaacaatagtaaaataacaataaaaaagaagaatatctcattgcaaacagctttagcggatattagggaacagaccaagatgtctgtatcttacaacagttcccaactacctaaaacaagaatatctttagatataaacaaccagtctttggatcaggcactgaaaactattcttgccggaacagggttcacatataccgtaaaagatacttatataatgattattccggagcagactgctaaaaaatctaaaagcagaaatgtggtgggtaatgtagtggatggaaaaggtgctccgctaattggagttactgtggtcgaaaaagggaccggcaacggaactgtaaccaatatggaaggtaactatcatatcactacacaaggtgccacacctgtattggtattttcctacatcggttatcagtcaaaggagatagttgtaaaagaaaatactattaacattgtattggaagatgaatctcaggcactagacgaagtggttgttacggctttaggtatcaagcgtgctgaaaaagcactttcctataacgtacagactgtaagcaattccgaactaaccgtggctaaggacgctaatttcatgaacagtttaaacggtaaggtcgctggtgtcaacatccagaagagttcctctggtgtgggcggtgctacacgtgtcatcatgcgtggttccaaatctatcgtcggaaacaacaatgctttatatgtagttgatggtatgcccatcggaaacccttcacggggtgtcatccaaacagaatatggtgcagtggccggtagtgaaagtatctccgactttaaccccgatgacattgaaagtatctctgtgctgacaggtccttcagcagcagctctttatggtgcagctgcagccaacggtgtgattctgatcaacaccaagaaaggtagtgagggaaagatgaaaattaacttttcatccaatacagaattctctaaaccgatgatatcaccggagttccaaaatagctatggcaaccgagataattcctatcgtagttggggagagaaactagctacaccttcttcatttgatcccatggactttttcaaaactggtatgaataccattaactcgctgaacatttcttcgggcacgaaaactaaccaaacgttcatctctttggcttctaccaactccaagggtgtcattaagaacaatgaatattaccgttacaacttctctttcagaaatactgcgctaatgttggatgacaagttacacgtagatttgggggctagttatgtcattcaggctgagcagaacatgatttcaggcggacgttacttcaacccgttatttccgctctatctgtttccccgtggcgaggacttcgaaaatgtgaaaatattcgagcgttataacgaagaacgtcgtttccccacccagaactgggaatatggcgatcagggactttcctttgaaaatccttattggattatcaaccgcgaaatgtttcccaccaagaaaagccgttacatgcttcatgccagagtacaatatgacatattcgactggttgaatattgctggacgtgtgcgcctggataagactcactctaccgaagaacgtaaacttcatgcttctacactcgagctttatacaggttcttccaagggtagttacacgaataaagaggagttctacactcaaacctatgctgacgtgatggctaatattaacaaacggttcggtacagacttttcactgacggccaacgtgggcggtagctttgaagatcattatacacgtagtattgatgtaggcggcaaactgatgacggtgcccaatctcttctcgctggccaatgtggaacccgcttcaggtaaaagagaccaaggatacctgcgtacacgcaacgttgccttctttgccagtgcggagctaggttggaaaaacatgctctatttgtctgctacaggacgctgcgactgggcctctcaattggtcagcaatggagatactccctgcatcttctacccatccatcggtctgtcaggtatcattagcgaaatggtgaaactgcctgaatttatttcttatttaaagttacgtacatcctatacagaggtaggatcgcctattacgcagacgggtatcactcccggtacggtgaccgacccaatgtcgggcggcgttattaatccgatttccacgtatccgtatcccgatttcaagccggaacgaaccaaatcctatgaagtaggtatcaatgcccgttttttgaacggacgaatttcttttgacggaactttctaccaatccaatacgtataaccagacttttctttcggtcatgtctcctgcaaccggttattcaggtttctatgttcaggctggtaacgtgcgcaaccgaggtgtggaaatgacattgggctacaacgatacgtttggcaaggtgaactactctacccatttgacttatacagccaaccaaaacaagatcgtagaaatggtacacgattatcgcaatcctatcgacaactcactggtaaatataactgaattgactttgaaggaagctggtgatgtatacctgcgtgaaggctattccatgtccgatgtctttactacaggcattttacagcgtggcagagacggcaagctcgttgaagaaggaaacggttatcaggttgaccgcagccaacgtatccgtttgggatcggccgatcctgacttcaccatgggatggcgtcatgacatcaactacaagaatatctcactggggttgatgattaccggacgttttggaggtatcgtcacatcgcagacacaggcattcatggatgcattcggtgtgtccaaagtatcagccgaggctcgcgacaacggcggtgtgatgttggacggacaccgatatgatgccgaacgctattacaatactgtgggtggacaagggctgatgagttactacacctacgatgccaccaacgtccgtctgcaagaactttcgttgacctattcgctgccgaagaaatggttgggtgatgttttcaacaatgccactatctccttcgtgggacgtaatctcttcatgttctaccgtaaggctccgttcgaccccgacatgaacggttctacaggtacgtataaccgcagcgattttttcatggctcccagcttaaggaacttaggatttagtattaagtttagcttgtaacaattaatatattcaatttatgaaaatacagataaaaaagatagtgggggtactattggcatgtgcagggatcatgacaagcacctcatgcgcggattttgaagagataaataaaaacccgtatcttcctgacaaagacatggagcagaaagacggtgtgcttaacggtgcctatatgccgaatttagaaaaacatattattcccgtaccgctcaaaactgataacacagacttgaccaacgcttatcagatttccatcaacctgtgcggtgactcgtggatagggtatttctcgccacgtgacaacaaatggaacgaggcgtccaacaccactacgttcttcttttcggaaggctgggtgaacttgatgtatgagtatgctatcaccaacatctttgctccctggatccaactgaagaatatcaacatgagtggcgaaaaccccaataaagagatgtacgctattgcacagatatctaagattatgggactgcatcgttctactgacaagtttggccccatcccttacaaacaggtgggaaacggttcgttcactgtggaatatgattctcaggaatcggtgtatcgctcgttctttgaagaactggacgaagctgtcaccgtcctgtacgacttttatatgaaagccaacaataccgtccccatggcttcggacgtagtgtatgagggcgacgtgaccaagtggatacgtttggccaactcactgatgttgcgacttgctatccgtgtacgctatgctgatgaggtattggcacgcacatacgctgaaaaggctatcaagaacccaattggcgtaatggaaagcatagacgatatggcaaaaatgaatagaggagctaatttgcagacaaaacatccgatgtaccagattgcagacccgggtcagtacaacgatagtcgcatgggagccactattcaatgttatatgaaaggatatgcagacccgcgtatctccaaatattttcaggatcaaggaaagaacgctatacgtgccggcttaccggttactcaaaaagtgtatgacggagcgtcattgcccaacatttcggaagacgatcctgtgtattggatgagggcttcagaagtagactttctgcgggcagaaggtgccttagcaggtttcgatatggggggcggaactcctcaacaatactatgaatcgggcattcggaaatcttttgccgaatgtggcgcaagtattggctcttacctgaacagtaccactcctccgctggcctttacagatccggtgaatgcggcctacaactatgcagcgcccagtatcattaccgtgaagtggaatgaggcggatgatgtagagaaaaaattggaacgtattattacacaaaagtatctggccctcttccccgacggtcaagaagcatggagcgaatggagacgtacaggatacccgcgccagattcctccggtgaacaacttcactaactctgacgtgaagaaaagtgacggtcacaaggatggcgtacgccgtattccatatccgcgcaatgaatacgaacacaacggcgaaaaccttcaaaaagccatccaacaatatttgggaggcatagataaggcttccgtaaatgtatggtgggacaaaaaagaaaaaaagtaactcttaaacgatacagaaatgatgaataacataaaaaaatgcttcgttttatcactcatggcaagtttcatgttttcatgtactgacattgaaactatcgacttggaaaaagaagccgtgaaagatctgtatgagaatcgtgataaagataaatgggctgaggaagatgcccagaaacaacagaattatgaggactctgtacgcatagccgaggagaacaaacgcctctatgaactctaccttgcagatttaagggagtacaaagaaaccaagcatccggtgatgttcggctggttcaacgcatggagtgctgaaactccgggcgaatactccaatctgacgttgattcccgacagtatggatatcgtttctatttggggaaattgtttcaacattaatgaaaaacgtctgaaacagatgagagaggtgcagagtaaaggtaccaaggtcattgtgggttggatcgtagaaaacgtgggtaacggacttagtaatattcctgaaggcggatggtctgatgacccgacaacaggtatcaagcaatacgcacaagccattttggactccatcgccaagtatggatacgacggcttcgatattgactatgaaccttcctatgcctctcctttcaaaccaggcaatcactgtggcgactggacaaacgactggacagactacaggcctatcatctcttgcagctcgtatgacaataaagaatatgaaaatcttttctttcaaacattacgcaatggtttggacaaattagaagccaaagacggcaagaagaagattctgaacatcaatggctcaatccactatctatccccggaaatggcacctctcttctcctactttgtggcacaatcctataatggtagttatagtggatggacatccagaataaccaaccgtttggggaatgatgtgaaagaccagattatctatacagagacattcgaaagcggacaagccaaccggataagttttgaaaattatgcaaactttgttgttaacaacctcaaccgggaagctggtggtatcggtgcttatcacattaatgcagattcatttgacaaaaacgaatatcgttatgtacgaaatgcaatttccatcatgaatcctcctatcaagtaatataatcactttataaaccaaaaataatatgaagaaacatatagcattattattcctgtccttaggctttttcaccgcttgcgacatggtcagtggtgaaggagaaggtgctgacaatgcggtctacatgggtaacaccaacagtagcggagtaatctcgatggtggtaagcaacgataaaggtggcagttctgtaatcactccccgattagccaacattaccgaccagccagtggaaataacgatagaagtggacaaacaactgttggaggagtataacaccaaagccggtctgacgctggaacctatggcaatagaagactttgtattcatcaccaaggacaagaaagaaacacacggaaaagctgtggtgactattgaacccggacagtacaacgccagcgtggagataaagatcccccaaatagatgaaaccaagtatccctacagtaagcgttttgctattccggtatccatcactagctcttccaaatataagatactgagctcgccggactttactatcatccgtctgagccgcgagctggttacttccgtcggacaattctcacgtgcaggaagtatcgcactggtacccaatgcagagctgagaaagcctatggataattggaccatgcaggtgagtatgctttacccgagaatgactaatagtaatcaaaccgtcatgtcgatccaatccggtacgggcgatttttatacccgtatcaccaacgacaaaggtatccagatcaagaacggacgcgatggagatgatacttggaccaacaagcccttatctaacgggaaatggctgaacatcagccttgttcacaggaatgcttccagtatctcggtttatgtgaacggagaattacagaagacgttcgaaacctcgcctatctatttttcggacatgaagaagtgctgtctatttataggcaacactcaatatactaatgtttatattcgcgaagcacgcatgtggaacagggcattgaccgacggagaaatcatagataaggaatatttgcctcaagatccaacagatcccaacctgattatgtacatgcctttcaacactgtagagaacaatgaaatgaaagaactgactggcaattgggaaatctcagactttcgcacattgggtatatgggatgaagatcctcccaaaatatcatatgtagagaatgtacaattcccggccgaagacctgataattgtagaatagctctcctgttcgtgtaacaaattaaaatcgaaacaaatgaaaaaaataattcaattgctgtatatactgtttgccgtagctgccttttcggcttgtagcgatgacaatcagggagaagtggtaagccaggacttgtcttatcagctcgatgcaaactatgtatttgtagatattccggaaaagtttctgtttgatccttccaacattttatatctggaaggtaagaccgtgatgaaactgaatgccaagagcgatggaaaacagactacgataaccgaaggaaccgagttcacctttaatgtaaaattgaaaaaggctttgaaccaaaatgtcaaagtgcgtctcaaaaagaacctcgacttgttggaaggacatactttgacagagtttccggacgaggcattcgaattgaatgatgccatcataactgccggaagtagagaggggacaattactcttaatatcactaatccagatatattgaacaaactaccgggatacgttcttccacttcgcttggaatttgtagatgcagtcagtggagtgaaaatatcgaaacagagctacaacgtgttaatagagataaatctcaaattggagaaagacaatattgatccttctaatgatgagattactggagagtatttcaataacaacgttgtttttgaatcaaataaaagcgatggtttggaatttctgtatgatggaaaaaactctggcaatacgtggtaccctaataagattactttcctgacgatgactttcccggagctcacaagaatactgggtgtcagaatcaactttgacaccggttactacagtcttggaagtttgaacgtgtatgcagacgaaggtaacggattcatttcatatggcaaactcaccagaaatgctaatggcaccatatatctgaagttcaaggaacccgctgacatacgtgctctcaagtttgatggaatgttgaccactagcggtggtacaggaccggacatctacgaaatcacattcatcaaatagtgtgaattgacagaaagaatgcaaattacacaaaaaattattctgagactgtcaacagtacatccattaatgtaatttgcgtaatttgtgttctttctttttattattgcttacctgtttatacctaactatatgtttaacatactatctaatattactctacgaaatattaccactgccggagtggttctcacagttgtgatatacctttgtacatcttgtaggaacaaccatgccgaagtggaacgcataatccgcaatcatcttgaacccaccaaagagctatatgctctcgccctacagacgggcgaagttaccctgcctcttggcggcaaatatccgcatgttacctatccagttccgggaggtacggaaacccctatcagcaatgtatggattgtaaatggcaactatatgggcaaaacatacgaatgccacggatgcgactcgtgcatgaagtgctatcaagatgccgggctgataacatataacatcgttcgtagagacagtacttcagttaggagcaccgtatgcctcacagaaaaaggaaaacaatacttaatcgaacgacatatttccggatttcaccctattatcaatgcctggcgccgaagagagcaactggaagtagtactggtggccaaagaaaagtttgacttggagatacacccctcggacactacggaaatctatcattgtaaggtacaccgaaaactcgaaattactcccttcatcgaagcattgggtgctaccggcaaagagaaccaaccggattatgtgcgcaaacttcgtgtagaccttaataacaaagagtaccctatggtaacttacatcgaaatggagccataaaaaatattttctatttctcaaacaaaacacagtttttcaatactcatattaaaacttttgggcaattttgtctaaatgaaataaatatcttatgtaaagctttacacaaattttccaaatggataaaacaaagcttgcgtacccaatcgtttttcggaacaacagagaatattgtatatacacagatatgaattgcggtctgtgactacttgctacttatcatcattagtatccactaataggacatctactaaaaccctcctgttttattagggcactaatattatcccaccattataatcaagtaaaataatgatttttcataatcatctgataatcaatgtacatcacaaatatattagttttatttgaaactattgttcaaaacgactatctttgtgcaaagattaagatatagataaaagatttgactatgaaatatgatatttcctatatgacaacagaggctgtaagcctgcttaaatcactgattagcatcccttccatcagccgggaagaaacccaagctgcggattttctgcaaaactatattgaaatggcaggtatgcagaccggacgcaagggaaataatgtgtggtgcctcagtccgatgttcgatttgaaaaagcccactatcctgcttaactctcacattgacactgtaaaacctgtcaacggttggagaaaggatccgttcactccccgcgaagaaaatggcaaattgtacgggctgggcagcaacgatgccggtgccagcgttgtttcgttattacaggtgttcctgcaactatgtcgcacttcgcagaaatacaacctcatctatcttgcctcgtgcgaagaagaagtttcaggtaaggacggaattgaaagtgtattgccgggacttcctcctgtctcattcgccatagtgggcgaaccgacggagatgcagcccgccattgccgaaaaaggcttaatggtgttagacgtcactgcaacaggtaaagccggacacgcggcacgcaatgagggagacaatgctatctacaaagtattggatgacatcgcctggttccgtgactatcgttttgaaaaggaatctccgctactaggtccggtgaagatgagcgtcacggtgattaatgcaggtactcaacacaatgtcattcccgacaaatgttctttcgtcgtcgacatccggagcaacgaactttactcaaacgaagaactgtttgtggaaatcaagaaacatatttcctgtgacgccaaagcgcgttcataccgcctcaactcttcacaaattgatgaaaaacatccgtttgttcagaaagcagtaaagcttggccgtgttcctttcggttctccaactctgtctgatcaggcattaatgtccttcccttcggtaaagatcggtccgggacgctcttcacgttcgcatacagcagaggaatatatcatgctgaaagagatcgaagaagctgtcggaatttatctggagttattggatgggcttctgatttagttacatcaatgtatatacaaattactttctataaaaatatcctatcgggcgtattcaatctcgcatataaagaagaaaaaagcgaacgtttcttgcacaaacgtgttccatgttattaataaacttttgaggggtttattaataacggtatctaagtttattataaactctcaaatccaagagaaaggttattcctgtgatttttaacaacaaaaaaggctgcaaaccctacaaagattcgcagcctttagtttataccaaggttcttacagcttaactactgtaaggagtttctattccactgttgcaatattgcactattttcttttccattcttctttagttccgttctttactcatcactattctcctacaaatatacaaaataaaaagagcttttccaaaagtatccggtccaataaaagaacataccccaccgtctgtctacctttctcttttatccaaacaagactagaattaattaaagtaaagattatgagcaaaatagcagtatatcacccctcttctattttgtcccccgaaaaaattggaaaatataaaaaagaaccgtacatttgtctcaatatcaaataccaataaacacaatgaaaacatcaatactattaaaaacaacggcctctaaaacacaaatcaataccattttcaactaataaaaatagaattatgaaaaaaagaattttattattatgcgtattttgcatcactctaggtttcacctacgcacaaacttccgatcggcatattacaaacaaggttactgttgctgtccgtacatacgaaacggaaacgattgcccttattaaagctgataatctgaaaaaagcatggaaggcatcatatatccatgtaatttcagtaaatccccagaccaatcttaaagcctttatgcgactggaaaagctattgacagaggatcccatgttacataacccggaaaatacattgataatctgtaatgatgaaaatgaagaatttgtaaaagaagccgcaacaggatataatatcgtgaaattgccagcattaggttctgccggatccatgattattgaagggacaataaaacctctgacaaaagaagataacgagccggaatacgacttcaaatttacatcagaaaaaagtatataactttttgactgtagaaagaaggttaagccgaccattgataattcagattatcaaatcaaaatagttcctttgaaaactacaggattcaagtataaaaccggaattctgtagttttctatttacacaaaatagtgaaagtgccctagaaatagacttttttatttttcttcccggaagaaacttgataatccttcactcttatattaaaatatgatttagcctttccatcatcattagaaggcaatagttccttatcctttgcatgtggcaattcaaggatatcaatttccttcacatttttcttcaattttggaaataaaagactgatataaatgtatttatgattaaatccttcaacggttaacagcctatccatagatgctccgccatcatatcctctcacattatattcatcgccactttctttatctataatcttgaatcccggactataatacagccattgtgaatcccaataaacaggttgcacgaatgtcacttttgtatccttttttcttctttcaatcgaatataatgaaggagttgtagacattccgttctcataaacttttccaggaactacagcgatactgtctttcggaagcaaataagcttgtgcacacaactctctatcacgtttctttttttgctcatattctttcattgcttgttcgtgctcaaccatttgtttatccattcccgatctcacctctctaaacatctctgtttggagttcctgtaccaacaatggcattgcttcacgcatcacagccaatgaactttctttatatttcctgccggcaggagattcataaaacgcggcaattgctttcaaatcttccaatgtcaaatgtttcttataagcaggcatacacagttcaatcaccctattttctattttttctttccagtctttagcaaaatcgttccagtaggcatcatcttttcccggtgcattaagtttcatcacagaaagcattttcggataaagatcgtccgtagcagccgaagcaccggaaagcttcatcatcttctttaatgtctcttcatattcatctgtcgcattcgtggtttgtgcaaagaccggaaaagttagagtaagcagtgtaattacacacacaattactcgggaaggaaataagtttttcataagcatcaaattttctttattaaacaaatgttctaaacatattatcatattttctattcttagtccagtcgtatcatgagtttctttagaatcataccaccagaataattaaatacgcttcatatttcattagtatgcaattttaataaccaacaatatccgccaaacgatcctaaaaagaatatttcttataaagatatgcaatatttaattattacgcaaggaaatgttatatagtttccattaatttctcctgctattacaacatatagataaacctctgctgtccgttatcatctacatagaatggaagttcctctttgcctttcgttagattcctgagccataaaagcgaaccgaacggaacgccgaccgtaatataattacacttagcctgttgactcaggatttttttccattcaccattgtcccaatataacaattcatattgattacctacaacaatgccattgtcagcattcagtggcatcattcttacttttgtaacaaactgaggttccctcaacataaaatgtatagttgggtaaggctctggagatgtttgtggattaccatcatattcagccttccacttaatttgctccaaaggttcatccattagtcgaacttcaaacttatttccaaccaaagtatccgcaggcgaaaatataggcaaagaagaggcaggaatggtatttttatatccatatcgaatatcggttataaattccagttccgacaaagcagcatggggatactcatttgtagtctttatctgataatattgatagggacctttgttcatgccaagcttgatgtcctgaaaataagggtacagcgtatcagttattaccccaacagtatcacaagggttaaaccctggtttattgctcgccaaaacgactgtcccaatcaattttatcgctttattcaccaacccttgcttcatgggaaatttacgaagtaatgtcacatcattaatttttcttcctgtatgaggcttctctattttcccttccttgtttaaatagaaaggttctccaaaagaaaatgatttgccaaatggtgaataataaacagggaaataaaacctgtcaggaattacggatgagaaagtgacattgtgctccatacggtttattttcccccaagttacgggaatgataccggatgacatcccgctattaaaagcggcaagatatgcaagattgttatttccagtttcctgataagaaagagtcaaaggaacggtcttcaataaatgtgaagttacatccttcagaaatggagaatcaaagagttcaggaatatactcaccattcttttccaaaaagaaaggcgtgtctttttgttctgaaaacataaaacgataaatattcagtatgtctttcgtttcaaaagaactattgtcactagtcggtattgatgattccggattaaacgctagccaattcccatttttatctaataccactccatgataatgccttccctgaaactgtctataacatgcattaaattcaacagcagtaggtatgccacaagccctcaatatagacacaccataacttgcaatcgggatacagtcatgaaaaccattaaagaaaagttcctgataaccgacttcttctccataaggatacaacgggaaaaacttgcgtaactgatatattacaaagttgtatcgccgaatcgcttcttgtacagaatccttattaatatctgtcagatatttacccataaatgcagaatggacatctgagaagtcaattagggaataatcgggtatactccgataaggaaggatatactcgtaaaagtcttcaacggataaccgccgtatgccgtctatttgtttcctccactcaaaaacatgatctatatgattgattaattgcttggctgtgatccaattaaaatcataatcttctttccaaaacgttttgacagattgctctgatactctgacatcattctgttttctgaatccagtgcgaacactatctatcaatttttgtatatttccattatgaaaactatcagtagccacatacactgaatgatagaaaagagagtccgcaactcttgtcaatgagtccaataatggatgttgtcggggattcctgagagaataaaacgaatgatgataccgcatattcgcaatcaagaactttgcagctttcaatttctgaggttcatgcttataatgatccaaaacagcttccagttccgtcctatttgacccggaaattgaaaggacagtttcaacacgcttgtccatctcacttgtacagcctaatagcagaaacagaaaaaaaacaataataaggctattctttctcatattcaattttatttatataggggggatatcaattattattctcttcaatcaataattgcgcttgttcactcttcatttccctcttcatcatcctgatagcagaagttttaattttcatgggcttatctataactgactcggcaactctcagcatacatttccgattacccatatttttatataaatgaaataacttataaagaggcaggaaccgggaaggacacatcatagacgcattatcataatacctctccgccaactcatacttatccaattcctgatagttctcaccaatcataagttccaagtcatagtccgcccaatacttacgacattgcagtgctactgtcaaactctcctcatattgtttattttccaaaagtatggctgcatagttataaagaaaataaggattattttcaaacttcttctctaactctgcataagccggaagagttttgccggatgccccacaaagtgcaagcctggatgtatttccccattccttttctgccattacacgtttcactaaattatagatcccccaaaatgaacaaagaagaataaagatacatacagtattctttattattggacaggtaaaaacctttgctatatattcctttgtaagaattatgatgcacaaaaacgtaacaatccatgtaaaaggataagtaaacgtataggagaaaaatgaaaatacccctattgatataagggaataaaaagctattcgtttctccgcacaaggatgttttttataacagtatattaacaaagttatcagcgcaagtatcatcaacaaaccgacaaatccaaaattcaagagaactcccaaatattcattaaaaggatgtttcacattatcagctaacatggaataacgattcagtccatattgtcggaaataatcagcttgataatccatatagcgagcctcaaaactacctatcccatgtcccaaccacggtgcatcttttaccatacttacactgcatcgccaaataagtaacctaccatcagcggaatcttttttcatccagtaacatcctgacaataataaagcgaaacataatagagaaagatactttacccacctcttatgaaagaacttcatattcagaagaatgaaacaaatgaaagcaatactcataatgccagctcttgattgggataaaatcacagctattacaattacaaatcctatcaatcctcctacataccggatatatttattactatctgacaataagaatcctacaaaaggaaaaccagcacagagacatgccgcaaagcctgcaggattgtcaaaactccccgtaacccacaaagtagtagatatctgaaagaaaccgaaaaactgaactaccccgaacattgcctgcaaaaagcaagaaataacaatgataaaaccatatacagatatcctcgtatctttctgttcattctgcctgtaaaataatatgtttacagcttcatatgctaatactataaatagcatgaacacagcaaagcaccatttaggaacaatgtacgagtccgtaaattgtcgtgaacaggcaaaaagactacctaagcacaatgcagcaaacaaataatgagatgttcttatcattttacctattcccaacaatcattttttaaaagttccactcaatctttccaatgaccgcaacaattgccgtgtatccccgccaacagttgccccttgaataactctgtttttatcaataataacatttgatggatacacataaatatgtaatgtatcatcaaattcgtctctgtaatcgggaacaacagttatgttttcccacttcaggtgtaatctacccattaatctcttcacttctccattagaatcaggcgttagcgctataaaccgaatattcggataatcctcggctagtatatttaaagctgtaagttcccgtatacaaggacgacaatgcctattccaaaaacatataactgtaatatcggattcatccattttaacagattttctactcatatcagttaatttgatctgaggaagcatcttaccaattaaagtctcaagtttaggatgcttataagttaagtgaatttccgttatttcatccgttcccttgatagaaatgatgtatttacccgtttctaaagagtcggaatgcgcctgttctgttataggtctttgctctgcatcaaaatatataatcgtgtcgccttctacggcaatcttattactattaatacgagttaccttttgagcatgacaaacacctacaaaaaggaatgacaaaagaataaaatataatttcatatttcaaaggttttatagtatgtaatgtagctgaatcaaacgatgtgtaactcagctacaaaaacaaattattctaaaagatcatctttgtattttacaaacgcttctatcaccttttgaccaaaaacgatcaaaatcaatcatcaaccacttctatcaaattctcatcctccaatatttttttcaaccgataataaagatttaatttatgttctaaatctttcgattcatctacactatctgattgttcttccattaagcaacagtgtttatcttccgcaacaggagttgaggcttcatcaaactctgcaatttccacttctactacatctcctatttccaacatacctccgttccataccaaatgtatttcttcaggcatttttaaaccactaagagtccaagtcagaccactatgccaagtaatattagcaacgatccctactccacactgaggaatgcccgccttgcatgttttatctttagattttacaataagtcctttcatacaaattatataagcccttttactttaagttcaacttttagttgttcatattttattttcattttatctttatcatagattactttcataggaggagacacttttgatatttcaactacttttattacaaccttatcgcctatttttaagttctcatcgacccaaacaagcctgctcaaagtgtctgtccctcctatataaatgttatcgtcaaatgaatagttacagttcaccattacaaacgctacatcataggatgtaataatcacaggctcccggttattaattcttatttcaaatcctatcataattttttttagtgaggacgaggacaatcccatattcctccttgggctaaacagtattcatgacagcgcctacattcggaatacccccaaccaccagaatttagtccactatgttctttcccctccatacattcattatattttctattacaataacttgtattactactttgctgactcgcacataccacgattcaaatccattttacacttcaaaacttgattcaacaaatggatagcattatatttaggaattttaaagcggttaggataatgataattagttattttcatatcagaaatcgcctcggttgtatataaaaaagtttctttagttgctccaggaattaaatcaatgagtgtcccagtatctgaaaacacacatgtcaaaggtagtgatagaggacaaagccatttcatataccaagcatttgaagaaatgttaacatctgcaatattataaatagctttgcttgtatctacaaaacctttattcttcaagtttagacaatacctttgagacaactcttgagtaaaatctactaagactatacaaaatgccttttcatttttatatgcaatagagcaaatgtcttcaaacgactgattactatatatcttgtatatatgctcattgcaattaaataaaagcaagcaaataattatagtaaataaaaaaaatagaaacgattcttcaagtctttttctcatattcagaggtgtatcaaagttttcccaaagataaactgaaaataaatcttatacaagtaattgttacatccctctcaataatataccattaattttcaggcacttataatcacagaaaagattagataaccctatattgtaacattacaaatatgcattaaatcaagacctaactagataaactattttttatgcaaatattatctttaaaacaaaactatttttcgttactttgtacccacaacaaactaaatcgaacggatatgattaacccaaagaaaaaaattagcctccatgtaacagccattgtctgtgttgtacttgcaacaacttttttcaatagttgtaattcgaatgattataatgatgagcaaatgtatgatacaaaactccttattgataccatagcaacttctgatgaattttgggaatttgaaaggaacagtgaacttctatcagataagtttcaagcttacacttcaaccttgagcgcagaagagtataacaaactcatggaaaatttaaacgatgatgattatatggaagagtttatcggaaaagcaaatttagaaaaagaactccaacagatgaatgaagccaaggaaaacttacttttgcacactgggttctccaaactaagcgaggatgaacgtatgttactattcatgcagtatgctgaaagtcgtgaatttacaggaaaaacacttataaagacacgaacagaagataatgttaatagttgcgaaacaaataaacagatagcgtatgcacaagcaaaagcagattatgataatgctatcataaaatgtagacaagagtcttctacaaattattgttatacacaagcattagctaagtatgaaagaagtaaaagaacatctgacagagtatacgaagaatgtataaaaaaataattatatatagtcttgaataatgtaatgtggcttaccagcattgcaatgtgttatttagattgctttattgacaacttaaactacacatttcaagatttcctaattatcttctttgaacttctcgcacgtataacacttgtaataggagcaatcagtatattcccacaagaaccatactctaataaaagagtgtggttctattacatcatcatgggtgggagtttgactattattgacacatttatacgattggcaggtactttacaaaagttattattttaattccttttgaagaaaacgtccaaatcaatcatcaaccacttctatcagattctcatcctccaatatttttttcaactgataataaagttctaaatcttttgaataatcttctactctctccgacatcttttctatcagagaactgtgtttttcttctgaaacaggtgctgaagcctcatcaaattcggctacttccacttctattacatctcccacctctaatatgctgccattccatataaagtgtacttcttcaggcattttcaaacctccaacactccaatatgcgccactatgccaagtaatgtcagcggtgaaaagtgtcccgcagtgaggaataccagctttgcatactatatctttatattttacaataattcctttcatcctatataagtcctttctcttgaagtttaattttgagttgttcatactgttgtatcatccattccctgtcacatttcgtctttttacatggtgacacctcatctgtttcaataacttttattattatcttatcaccaatctccggcttacctttaagccaagtaagatcgttagaacaatcacgaccgatcaaactaatagtagaacccaaaggataaccatacccgagtattacagatacaacatgatctgaagccattattataggcttctcatcgttaatatatatttcaaatcctatcataacctactatttcttgttatattggacgagggcaactccaaacaccttgtgctacacaatagtcaaaacatcgttgacacattgtatatccccaccctccagtattagggtcaccataactagtacccgtacagcccacgtacttttccatgcaaaaatccatatcgctgtttccctcattttctttacacaaaataacctcataaatgaatcctgccgcagtaaaaacagtagcaacagaggccacaatttcgccgaaaggcgtcggttcaccaatagcaatcgtccaaactgtcgctgtaattttgcgacaccattctcctatatttcctccatcctcaggtcctcttgttttaaccttcgataattttatattattatatggagtccttaacattaaaccttggtgctcaagataaactattttttgtcctccatagtataacacagcaataacattcaacaatctttcttgttctatttctgggacttgtgcatgaatttctttatttagagcgaccaacctagccaataagtcttgagaagatctacttttctcacactcaccaataattttgtgaataaactccagctgaatatccgtcaacgaattatacctttccataaattcagtcgcactcatcatctcaattgactgaatctttccggtagcacgacttcttgccattgtaggacttgcattataccaatcttcataaaatttcttacgaaaatccttaaaatcaacgacttccgaataatccatatttaaatcattcagtttcgctaccgtaatttcaatttctttagccacagctttcccataagcctcaacctgtttaggaaaatcaatttcctcctctacaatttcttcttcaaaaacagactgtttatctataaaatcatcactttgcgaacaactttgcgtaagcaaagcaatactaaatacaataaaaattaagttcttcatcatctttggttcttttaaattaataatcaatatatactggctaatattttcacatacagaataggcttatttatcgcattagaagttataaaaacgtctctaattacttctccagactcttccgacttaaaattaaaactaaccattgccgaatcattaggagaaacaacaaattcatcagtgtggtctaatagattcaagcaagagcaacttgtaaaaatcctagacacctttaaaggatatttcccatcattataaatagagatcacaaaaacattatcttcactaactgcacaatctgaaagagagactacctcactatttactctaatattaggttcatcatctattttaaaatttggattcaaaacttttttagcagtaataaactcatttttaaacaattctaaataataaggattctccaatttcatcatcaaattcgctaatgttttagtttcaatagtatcattatccattagttccccaaccatacccaaataaacagaatatggatataccaatgaatcaattgagttatttaatgcagttggaatatatataccttgattcaaatccattttacacttcaaaacttgattcaacaaatggataacattatatttaggaattttaaagcggttaggataatgataattagttattttcatatcagaaatcgcctcggttgtatataaaaaagtttctttagttgctccaggaattaaatcaatgagtgtcccagtatctgaaaacacacatgtcaaaggtagtgatagaggacaaagccatttcatataccaagcatttgaagaaacgttaacatctgcaatattataaatagctttgcttgtatctacaaaacctttattcttcaagtttagacaataccttcgagacaactcttgagtagaatctactaagactatacaaaatgccttttcatttttatatgcaatagagcaaatatcttcaaacgactgattactatatatcttgtatatatgctcattgcaattaaataaaagcaagcaaataattatagtaaataaaaaaaatagaaacgattcttcaagtctttttctcatattcagaggtgtatcaaagttttcccaaagataaactgaaaataaatcttatacaagtaattgttacatccctttcaatactataccattaattttcaaacacttataatcacagaaaagattagataaccctatattgtaacattacaaatatgcattaaatcaagacctaactagataaactattttttatgcaaatattatctttaaaacaaaactatttttcgttactttgtacccacaacaaactaaatcgaacggatatgattaacccaaagaaaaaaattagcctccatgtaacagccattgtctgtgttgtacttgcaacaacttttttcaatagttgtaattcgaatgattataatgatgagcaaatgtatgatacaaaactccttattgataccatagcaacttctgatgaattttgggaatttgaaaggaacagtgaacttctatcagataagtttcaagcttacacttcaaccttgagcgcagaagagtataacaaactcatggaaaatttaaacgatgatgattatatggaagagtttatcggaaaagcaaatttagaaaaagaactccaacagatgaatgaagccaaggaaaacttacttttgcacactgggttctccaaactaagcgaggatgaacgtatgttactattcatgcagtatgctgaaagtcgtgaatttacaggaaaaacacttataaagacacgaacagaaggtaatgctaatagttgcgaaacaaataaacagatagcgtatgcacaagcaaaagcagattatgataatgctatcataaaatgtagacaagagtcttctacaaattattgttatacacaagcattagctaagtatgaaaggagtaaaagaacatctgacagagtatacgaagaatgtataaaaaaataattatatatatagtcttgaataatgtaatgtggcttaccagcattgcaatgtgttatttagattgctttattgacaacttaaactacacatttcaagatttcctaattatcttctttgaacttctcgcacgtataacacttgtaataggagcaatcagtatattcccacaagaaccatactctaataaaagaatgtggttctattacatcatcatgggtgggagtttgactattattgacacatttatacgattggcaggtactttacaaaagttattattttaattccttttgaagaaaaatgtccaaatccttgtcgtcaagccctaaacgctttcgagcacgagacctcatcgtacgataagtcccatcagtaatacaaaatatggataatatttcctctttcttcttatacatccgaatcaacacacataatacaatatctcgcggtggaagttggaaatcctgcttcttaagccaattaaaaaactcaggatcaacaatttggcatccttccaccagcaaaagatagtctttggccgagaattgagcaatagattgattctctacgagcttacgcaagaaagaaattcctttctgttctggtggaggagaatctagcaattgctgtattttttgagcttgaagaatagcctgccgacgttcgtccgccaatttatgatacagtgtaatagagacttttattgtagcggctaccattataccaataacggctaacacaggaatagtatactcagataataccggtgctatttccatatggatttctctcggcataatcatataaatttcatctgctgtaatcaaaataaaagctgcaatgaactgccaatctatcacctcagaaatgccaaaggtttctcccttctcatgaaatgtccacagtaatgcccccacaaagagagtcaaccacatcaatagatgcatagaagatgagaatgcatcaacatacattccaggaaaaaatgcctgaaatatataagctgccaacagaatcaaacaacaaagcaaacctcctgacagtaactgtttaaaagaataagtcgaaaatttcattacttactttatcttgtgctcttgaattacaaatatagcgaaaagaatattcacatagtcaatcatcatcaatattctttttcacaagataaaaaagatgtattatcaaacgagataattgcaccttcatcgcttttaaagcatgttacacattaggttatcccctcgcttttttttatcgaacagctttacagaaacaatcttccaaatgatcattcacaaaaccggcagcctgcaaaaaagcataacaaatagttgatccaaaaaacttgaagcctcgctttctcatgtctttgctcatagcgtccgattcgggagatgtagccggaacctgacttaaagttttaaaattattgacgatagcccgttgtttggggaagaatgataaggtgtatttgtagaaactaccgtactctttctgaatagctataaatagttttgcattattgattgtactattgatcttcaaccgatttttgacgattccatcatattgcattaaccgttcgatatcttcctgtgtcatttgtgctactttctccacatcaaaatgatgaaaggcttcccggtatccttcacgctttcgaaggatagtaatccaggatagtcctgcctgagcactttcgagtaccaagaactcaaatagagttctgtcatcagtaacgggttggccccattcttcgtcatggtattttaggtataattcatctgttccggcccagccgcaacgtgcatttatcagatcttccatactcttttatattattattaagcagtcaatatctaaaacatcagatattgactgctcacatttaacgggattatttctgttattacaaatacccctataacgaaacgctcggaactaatctgtattacttgtccaccgagaatttaaaaatgcactggctcatgtatttctcgcccggacgcagaacagccgaaggccattcaggcttgttcggagtatccggatatttctgtgtttcaagacatacggaagcacgttgattataggtaatacctttctttccggtcagcgaaccatcaaggaagtttccggcatatacctgaactcccggttcattggtatatacatccaatacaatacctgttttctgagatttcaatgaagcagccctacggttaatatcgcctttggcattcaatacccagttgtgatcataaccattaccgttcttcagttgcacaaagtcgaaatcgttgatacgttctcccaccggcattggtgtacggaaatccattggagtatcttctaccggaactatttcaccggtagtcataaaggtgctgtccaccggagtataataatctgcatcaatagtcagcagatgctctgcgttgctgcccgcatcgccatccagattaaaataagagtggttggtcatattgacaatagtcggtttatccgtctccgcttcatactgaatatcgattgcattgtcgtcagtcagtttcatcagcactttacaagtaatgtttcccggaaaaccttcttcaccatcttttgccacataagtcagttgcaattcctgcggattcaattgtacggcgtcatacacccgatactggaacccttgcggacctccgtgcaggcaatggccgtagttattacggggaagctgatattctacaccgtccaacgtaaacttaccctgattgatacggttagcataacgtccgatgcttgcaccgaagtcggaaggtttgctgatataatcctgaatggaatcgaaaccaagaactacatcacgcatctgtccgtccttatcgggaaccatgacagaaacaatgcgtccgccaaagttcgtgatgcaaacttccatattgttcttgttgcgcagaatgtagagatcggttttctttccgtccacttccgtacggaaattactctgtaatagaccggaatccgtagctttctcggctttcggtgtacaagctgccattaaaagggcggcaactgcccatacacataactttttcatggtgttttattaattaattactattaaacagacttaccaaaagaaatctaaaattcattctacaaagatgagaaaaaactaattgtttttttaaaacaaattgttcaataaaggataaaaattaatcattaattcaacttttaggataatacattagaaaaaagatgccaaatacgcccttcatttgcaataacttacctagaaaagatttagttttgacatatttcttgtatacgtatgccttacattgtttgactatcggttcagccaaggttccggattcagtttctctttctcccggcgtaactggaagtgcaataccgttcttccattatcagtgccgtcagagaaaacttgtccgatagattgcttggtcttcaccatgtcgccggactttacagaagccgatgataagttacagtaaacggaaatatagttgccatggcggattagtacattaaataatccattcaactggaatactgctgcgacttttccgtcaaagatagcacgtgcctgtgctcccggctttccttggatatcaatacctttattatccagtttcacattacgaagaccttccacagcatattgtccataatggctggtgataatataagcaccggatataggcataggaagttttccccgattggctgcaaaattgccggacaattcccggtcggctttactcattgtataagtttccagaggcttcgagttcgttttaacggttgttccggttccggcagtttgactttctttaccctccgctttcttacgggcggcagcctcgcgtcgggcttcttcctcggcacgcttgcgggcacgttctatttcttctgcaatcaacttgtcaatgcgggcattcaattggttagcttctctccgtttcttattgatctcaccttgcaaccctctctgtttcttttgcagattggccacaagcgtacgtttttccttctcctgcgcttccagtttggtcttctcgccttcacgctctttcaacagactctctttagcggctttcacctgttcccgttccacctttttcttccgtatctgttcctgtttcttcaggatttcctcaccttgcaaccgttgataagtagcatattcacgaacatagcgcatacggcggtaagtctgcccgagattcttggcagagaaaataaacatcaatttttcttcaatcgacttgttcttatacaagtattggacagaagcctcatactttttcttcttatccttcaaatccttttgcaaaccgttcaactgacgttgcaaggaagtcagttcacgttctatcgcttccacgtcattattgatagcaatgatataacgtttccgctcctcgatctggccggtcaataccgccagactattcaactgactacccacatctttctttgtatccttcaagattgattccgtctcggagatctgcttttgcagcgcaccacgtttgctttccaactcacgaatcagcttgttcgactgagcgaaaagaggaattgccaaccatagacaaccaatcagaattacaaagaaatgtttcatcataagaaagctaccagcatttttactaattcttccaagggaacttgccgatatttagaagtaagttccgtaggagtcattgaaaattcttttgtcgagaactcataaagttggactttagccttttccaacgagggaatgcctatatcttttcctgacaattccgtcttcccaccgggcaaagaggcatccaacaatatcttctccagacgggaaaattctgcattcttcggcagcatgcccttcaattcatctttggtggcacgaacaaaacgtttgttcatccggtctaccaatagcacaccgtcaggagtaacttccacacgcgctacttccgtacgcaagataggcattaataaggatatttgtacccgctcatgggttttcatcttcatagttcccccaacagacatacttcccccctttttaccgggaatagtcaattgaagtttggaagtcagatagctggacacctgaacattcttctccgaagtcgccaaatgcttcgagctcttacacccggccagcacaactacaaccaacaatagaaaaactattcttttcattctgcaatatatttcttcttttctattttctctttcagtgttttcgattcactacccatttccaatgctttcttccagtatttcagtgcaccttccacatcaccggtcataaaatagatatcaccgcagtgttccacaaccacatcactcttttcttcgtcactcttcattgcattatcaatgtagatacgagcttctgcatagttgcccttctcaaaaagaatccaagcgtatgtgtcgagataagtggcattgttaggttcggccttcaccgtcttgtaactcatttcttccgccttatccagatcgcggcgttccacggacaaataataagcataattattcaatgtaccaatattggacggattatacactaaagccgaatcataggctgcgtatgcttccttcatttgtttcttggtatgatagatatcccccataattgagtagaaattcgagactatttctttccgcgtgtcagtcgtcacacgttccagcgccttggtacaaacgctcaacacactgtccggctgttctgcctgatgataggcaatggctagataataatagaaatccaatgcatccggagtagcctcaatacccggttcgcagacttttataatctgtttatagtcttccttctttatcgccgcacttatcagcataagacgggcagctttattagtcggatccaaatcaacaacctgttccagtaccggtaccgcctccgcttccatacttttcgacaacagatattgtgcataaagcatcggaatctgcggatcatccaaatcttgttccatcatccggtcaaacaaggcgatcacttccgtactatcttttaccgatgattgttcattctccacaatcacctgacgcatgacactgatttttgtatccggagtaactttcttattcagcaataacgtatcgagttgttgctggtatagttccttctgacccgtctgttcataataagatgccattgaaaagagagccattggattatccggttctactgacaataccttctgataagcctcatatgcttcctctttttttccgttctgaagatatacatcccccagtatcacttgataacgcatatctgccggatattcattgacaagactctctatttcctgaaaagccttcttgtcatccttcatctgaagataaatacggaatttctccatcgacaactgttcattcttacctaagcgtttttccagccggttcagtgtagaaattacatcactgtacttctcctgtcgtccatagatgtcgagaagattgaacagaggatcttgcttggtcgggaaacgggttaccatttcttcaagcaacgtaacagctttatccaactcattctgttgttgatacagactcaccagcccttgactataccagtaattatcaggtgcataagtcacagccttttccaaggctgcctgcccttgcggcacttgacggagaaacatataatactgggatatttcgtaaagcgcagaagaagcattcgggtgaatgtccagacaatgttccaacaacccgaaagccgcgtcatactctttcttttctttcatccgcatggcttccagaaaaaaatagtcatacttacgctgttgctcctctgttaattgagaagccaaaacttcttccttctgaacttttttctttttatccttctttttcttaaccttctttgtaactgcattcgcgccaagagcataccccgacaccataaccgcacctcctgctacactccccaccacttgcacagccatgcaggaagtaagcagcaaagtacttaacaacgagaataatagtatccttttcatttttttcctgtgtgaccgaagccgccggctccccgttccgtttcatccaatacttccacttcctgccatacggcctgttcatgttttgctatcaccatttgtgcaatacgttcaccgtcttcaatcacaaaagtttccgatgacagattaactaaaataatacaaatctctccccgataatctgcatcaatggttcccggagaattgagaacggtaatccctttcttgatagccaaaccactacgcggacgaatttgtgcttcaaatccctgtgggagagcaatatatagtccggtaggcaccaggcagcgttgtagcggttccaatgtgataggttcggaaagattagcacggatatccattcctgcagacaattcagtggcataagccggaagcgagtgcttcgatttattgataacttgaatattcataaatacacgtttactatattaacgggcgaaaatacacattttgaactgaaaaatagttaagtttgcagttaaataatgtaccggcaactaatttgtgaatggtaaataacgaaataatgattaaaatgatgaattggaaccaattaatatctgcaaaacgcttcggaatggaagagttccatgaagaacgccaggaaaaccgttcggaatttcaacgggactatgaccgcctcattttctccgcccctttccgccgactgcaaaacaaaacccaagtattccccttaccgggcagtatcttcgtacacaaccggctcacacacagccttgaagtatcctgtgtcggacgttcgttaggaaatgacgtcgcaaaagcgattcttgagcgccagcccgaactgcaggagtctttcctaccggaaataggttctatcgtttccgccgcctgcctggcgcacgacttgggcaacccgcctttcggacattccggcgaacgtgccatatctacttttttttctgaaggtaaaggacaattcttaaaggacaagcaaccggatggagaacaactttcttcgatggaatgggaagatttgacacattttgaaggaaatgcgaacgcattccgactgctcacacaccaatttgaaggacgccggaaaggaggatttgccatgacttacacgacattagcttccattgtgaaataccctttttcatccagtcttgcaggtacgaaatcaaaattcggcttctttgtcagcgaagaagagagttttcacagaattgctacggaactggggcttactttgctcaacgaacacccgctgaaatatgcacgccacccactggtatacctggtagaagctgccgatgatatctgttatcagatgatggacattgaagacgcccataaattgaaaattctcacaaccgaggaaactaaagaactgctaatggcatacttcaacgaagaacggcaggcacatatccaaaaaacattccatatcgtaaatgacaccaatgaacaaatcgcttatctgcgttcttctgtgatcggattattaatccgggaatgtacacgtgtatttttagaacacgagcaagaaatactttccggcacatttgaagaagcacttatcaaacatatctccgaacgtccggcaaaggcttacaagcattgtgccgaagtttcgatcaagaagatttaccgctcacgagatgtactggacatcgagttagccggcttccgggttatcagtaccctacttgagttaatggtagatgcggtgacctcacccggaaaggcttactccgaacttctaattaaccgggtctccagccagtacaatataaaagcacctgcactctatgaaagaatacaggcggtacttgattatatatcgggaatgaccgatgtctttgctcttgacctctaccgcaagattaacggtaacagtctgcctgcggtgtaacgactttaggagtaaacgcctcatcctcctcacaaggcattttcaacgcatccggatgactttcaataaacgtctggatgtggcgcatgcgcttgtcctccaatatttcatctacagcaatcaggattccggtttcttctacatccccaaactcatagttgatagctgtgccaaacatacgcatagtgggactcaagctcatataagcatttaccaacggtggaatattatatcctaatttgcgaatctcacaattcaggatcttataatcttctttaaacgtattcttgcagaacaacgccttcagttcttcttcggaagtttccgattttaacgggtccattggagtcaccagatgttctttatcacagaaatgcttcttgaggaaataaagaatcatatcgcgaccgcgacggtgataactgggatacatggtcactttaccaaagaagtatttcacattcggcatgacaacagtcaacgcccccaatccgtcccaaagattatccaaagcaaacagacctttgcttccggcacgggtagactggtattcaagcgtcacaaacgagcgtcccaattcgattgtttgaggcagatattctttaataaaagtatccgaaaaatggaacatgtgggaagtagccagaatcggcgcccctttttcatcaaagcgcacatctgtcccgagcagataccgatatccccccagaatttcttccgcttccgggttccatacaattaactgcttgtaaggatgctccattgtgtcgtattcatcaatatccattgacaaacctgtccctccaccggcagcacggaaagctatctcacgcaaacgaccgatttccctcatcacattaggagcgttcaggtgagtaataatataaatctgattattactcttattcgtcattcgtaagcgtttgtcctccgtcaactctgccttcagcagttccttgcttatcggtttaataatatcttccatattccttgttatagttgttctatcagttacagtttatatacaatatcctttacgtattcagcccactgtgcaggtgttttcgacttatcgaaagtctgccagggaataggtttaccaaaggtgacagtaaaagttttatggcggtttttaaacatttcatccgcaagatacaacatagcgatgttaaacttaatccccaatgccttacaaatattggccagattgtagaagaaatcagaattcctgccgccaaagtgcacaggtatcacatcacgttttgtttgtacgctctttaccacaaatgtttttttccattccagatcacgaatcactccgttataacgacgcgagcacagcccggcgggaaacatgatcagttgattatcggactggaatccggcttccaccattttcgggaagtccttcgcctgcttccctgttttattaatcggaatacaaagcggagcaagtccgcgcaagttcatcagcaggtcatttaccagatatttcacttttccgtcatagtgacgccccagcacatagcccagcgcaactccgtcttgtccgcccagcggatgattggaaacgaaagtatacagcccgtctttgggaagattctcaatgcctttcacatctacttttgcgtccagaaagtccatacacgcttctagaaagtccactcccaccttgtctttcgattcatccaggaatatgtttatctcatcctgatgaacgattctttttaaataagaagtcacaaacttagggatgtacttatagtgcttcgaagccttcgtccgaagtatcttatcgacatcaatcaaaaataaagagtcatcagtcattcttttcaaataaaaatgatgccacaaaattagcggttcttttttattaatcgcaataatttggtagaaaatgcaggaattaagttcacatcgcaaaaaaacaacacctaaaaactatcaaatatgacctaaaatctatccgcagatagtttttcccctaaagaaagttggattcccccctaccggactccgggaaatgctgtaaacttgcatcatcgaaattattacaacgaatactcacaatttaaaaagcaacgtatatgaaaagtttaagcttcagaaaagatttagtaggagtacaagatgaactactccggttcgcttataaactgacaaccgaccgcgaagaagcaaacgatttgttgcaggaaacatcattgaaagcattagataacgaagacaaatatacgcctgacactaatttcaagggctggatgtacaccatcatgcgtaacatctttatcaacaactaccgcaaagtagttcgtgaccaaacatttgtagaccagaccgataacctctatcatttgaacctgccgcaagacggtagttttgaaagtacggaaagagcttatgacctgaaagagatgcaccgtgtagtcaatgctcttcctaaagaatacagagttccgtttgccatgcacgtttccggtttcaaataccgcgaaattgcagagaaactgaacctaccgttaggcaccgttaaaagccgtatcttcttcacccgacagaaattgcaggaagaattgaaagatttccgctaaaccttaactatataactttcaaacttcaaattaaataatttattaaatgtagatttttagttgtgtcaatggttaaaggcagaagtgattaaagtacttctgccttttttttctttactgctaagaaaaaaaagatttgccgcctgacaattcctttttccctatacagacaaaatcttctgtttgacaaagcatatttccccactgataaagacttatcaaagctacatcattttcaagcaaatagacatttaacaatctgttgaaaacttctctgaaagttttttatggaaaattgtggggaattgtggggaatttcatacttttacggtcgcttattataataaggtaatgatacgttttttagggaatattgaagccaaggcggacgccaaaggaagggtgtttatccccgccaccttcaggaagcagttgcaaattgcttctgaagagaagcttattatgcgtaaagacgtatttcaggactgtctgactctgtaccccgagagcgtgtggaacgaggaattaaacgagcttcggagcaggctcaataaatggaacagcaaacatcaactcattttcaggcagtttgtgagcgacgttgaggtggtgactcccgacaacaacgggcgcatactaatccccaaacggtatttacagatatgcaatatccacggggatatacgctttatcggtatcgacaacaagatagagatctgggcgaaggaacgggccgaacaaccgtttatgtcgcctgaggagttcggtgcagcattagaagaaattatgaacgacgaaaatagacaagatggagaaagatgaattgacataccacgtgcctgtattgctaaaagagagcgttgacgggatgaatattcgtccggacggaacgtatgtagacgttacgtttggaggagcaggtcattcgcgcgagattctttcgcgactcggagaaggcggacggttgctgggatttgatcaggacgaagatgccgaacggaacattgtcaacgatactcatttcacctttgtacgcagtaatttccgttacttgcacaattttctgcgttatcacaacattgaacaggtagacgcaattcttgccgacctcggcgtctcctctcaccacttcgatgacagcgaacgtggtttctccttccgtttcgacggagacttggacatgcgcatgaataaacgggcgggactcacagcggctgatatacttaatacatatgaggaagaacgcctggcggatattttttatctgtatggcgaactgaaaaatagccgcaagctggcatcagtaatcgtaaaggccagaaacggacagcagattcggacgatcggtgaatttctggaaattatcaaaccgctcttcggccgtgaacgcgaaaagaaagagcttgctaaagtatttcaggcattgcggattgaagtaaatcaggaaatggaagcgttgaaagaaatgttgctagccgcaaccgaagcattgaaaccgggcggaaggctggtagtaatcacctatcattcattggaagaccgtatggtaaagaatatcatgaagacgggtaatgtggaaggtaaagcggaaagtgatttcttcggaaacctgcagacgccgttccgtcttgtcaacaacaaagttattgtacccgaccaggcggagatcgaaagaaatccacggtcgagaagtgccaaattacgaattgcagagaaaaaataataaaaggaagtatggaagaagcagtaaacaagaaggcagacgaaagcaagaagaagaaacgcacttcactgaaaagtatcttgggcggcgacattctggctaccgactttttccgtcgccagacgaagttgctggtactgattatggtatttattatcttctacatccacaaccgctacgccagtcagcagcagcagatcgagatagaccggttgaaaaaagaattgacagatattaaatatgatgcgctgacacgtagttcggaactaatggagaagagccgccagtctcgtatcgaagagtatatttcaagtaaggaaagcgatttgcagacttctacgaatcctccttaccttattaaataagtggagagttgaaaattgagagttgagagtttttaaaagacgagcactgtggcagttaataaaaaaaatataatgacccgttacttcttcgtcatccttttgatggcgttgataggcgtggcaattgtcgtaaaggctggtatcaccatgtttgccgaacgacaatactggcaggacgtagccgatcgtttcgttaaagagaacgtaactgtgaaacccaaccgtggaaacattatttcttccgacggaaaacttatggcaagttctcttcccgaatacagaatatacatggactttatgtccggtgaaaaggatgaaaaacgcagaaaaaaggatcaggcacggcgtgattctattcttactgccaatatggattctatctgcatcggacttcataagatattccccgacaaaagcgcggcccaattcaaggcgcacctcaagaaagggcgtcaggcaaagagccgtaattacctaatttatccgaaacgtatttcttatatacaatataaagaggtaaagagattacccgttttctgtttgaaccgatacaaaggcggattcaaagagttggcttacaaccagcgcaaaaagcctttcggttcactggctgcccgcacgttgggagatgtatatgccgacacggcaaaaggagcaagaaatggtattgagcttgcctttgatacaatactgaaaggacgggatggattgacgcaccgacagaaggtgatgaacaaatacctgaatatcgtggacgtgccaccggttgacggctgcgacctgataagtacgattgacgtaggtatgcaggatatttgcgagaaagcattggtggacaagttgaaagagttgaatgcttttgtcggagtagttgtcttaatggaggttgctaccggagaagtgaaagcaatcgttaatatgacaaaaggcaaggacggtaattattatgaaatgcgtaataatgcgatcagcgatatgcttgaaccgggttcaactttcaaaacagcctctatcatggtagctcttgaagacgggaaaatcacacctgattatgtggtagataccggcaacgggcagatgccgatgcacggtcgtgtaatgaaagactggaattggcgccggggaggatatggcaagcttacagtgaccgaaatcctggaggtttcttctaatgttggcacatcttacatcatcgatcatttctacggtagcaatccgcaaaaatatatagatggactgaggcgaatgagtattgaccaacctctccatttacagattgcgggagaaggtaaaccaaacatacgcgggccgaaagaaagaagttatttctcaaaaacagctcttccttggatgagtatcggctacgagacacaggttccgcccctcaatatcctcacattctataatgcaatagcaaacaatggagtaagtatacgtccgaaatttgtgaaagcagccgtaaaagacggagagatagtaaaagaatacccaacagaggttattaacccaaagatttgttcggacaagactttggcacagatacgcgaaatcctgcaaaaagtggtaggagaaggactcgccaaacccgcaggaagcaagcaattccatgtatccggaaagactggtacggcacaaatatcacagggagcagccggatataaagcaggagttacaaattaccttgtcagtttctgcggatattttccttcggaagctcccaaatacagcatgattgtctctattcagaagcccggtcctaccgcttcgggcggtttaatggccggtagcgtattcagcaagattgcagaaagagtctatgcaaaagacctccgattaccgcttaccagcgcgattgacacaaactccgttgtcatcccgcacgtgaaggctggagagatgagacaaacgcaacgggtcttggaagaactgaatatcaatatacaaggcaagattgccgattccgggaaagaagtttggggaagtacacacgctgctccgcaagctgttgttttggaaagtcggggaatcatgcagaattttgtgccgagcgtaatcggtatgggagcgaaagatgcagtttatctgttggaaagcaaaggattgaaagtcaatctggtcggagtggggaaagtgaaaagccagtcgatagccaacggaacgattataaggaagggacagacaattacccttaccatgaattaaaagtaaaaataagtattatataaaaagagtatgttactaaacaagttactgaaagcaatccaaccggtacaagtgaccggagagtcagacatagaaatcaccggaattaacattgattcccgtttagtagaagccggacaactgttcatggctatgcgcggtacgcaagctgacggtcatgcttatatacctaccgctattgagaaaggagctgttgctgttctttgcgaagatatgccggaggaaccggtagcgggaatcacttatatacaggtgaaagacagcgaagacgccacaggaaagattgccacaactttctatggcgacccgacttccaaaatggaactggtcggcgtcacgggaacaaatggaaaaacgacaattgccaccttattatataatacattccgctacttcggatataaagtgggactgatttctaccgtttgcaattatatcgacgatgaagcaattccaacagaacataccacccccgaccctatcacactgaaccggttattgggaaaaatggcggatgaaggatgcaagtatgcctttatggaggtcagttcgcactctatcgcacaaaagcgtatcagcggattgaagttcgcaggaggtatctttaccaatctgacccgcgatcacctcgactatcacaaaacggtggagaactatctgaaagccaagaagaagttctttgatgatatgccgaagaatgcattcagtctgaccaatcttgacgataagaacggactggtaatgacacaaaatacacgttccaaggtttacacttattcattaagaagcctcagcaacttcaaaggacgggtactggaatctcatttcgaaggaatgctgctcgatttcaacaatcacgagctggctgttcaatttatcggcaagttcaatgcatccaatctgttggctgtattcggagctgccgtattgcttggcaagaaagaggaagacgtactcgttgcccttagcacacttcatccggtagccggacgcttcgatgctgtccgttcaccgaaaggagtgacagcaatcgtagactatgcacatacaccggatgcgcttatcaatgtattgaatgcgatacacggagtgctcgaaggcaaaggaaaagtaatcactgtggtaggtgccggtggcaaccgcgacaagggtaaacgtcctatcatggcaaaagaagcagccaaagccagtgaccgtgtgattatcacctcggataatccccgttttgaagagccgcaggacatcatcaacgatatgctggcaggactggacgcggaagatatgagaaagacattaagcattgccgaccgtaaggaagcgattcgtactgcttgtatgttggcagaaaagggagatgtaattcttgttgccggaaaagggcacgaaaattatcaggagataaaaggagtgaaacatcattttgatgataaggagatattaaaggagatttttaaataatgaaaacaatgtgctcatacgccaatatgcggttcggcttcgcaaaccgtccgtaaggaaaccggcatatcgacacattaataaattgacaatttatttatcatgttatactatctgtttgaatggctgcataagctcaattttcccggggcgggaatgttcggttacacctcattccgtgccttaatggcggtcctcatcgcattgcttatttcaagtatatggggtgacaaattcatcaaccttctgaagaagaagcaaatcacggagacacaacgtgatgcgaagattgacccgttcggtgtcaacaaggtaggtgtgccgagtatgggaggagtgattattatcgtagctattctcattccttgcctgttgctgggtaagttgcacaatatatatatgatattaatgttgattacaactgtatggttgggatcactcggatttgccgacgactacatcaagatcttccgcaagaacaaggaaggtttgcatggtaagtttaaaattatcgggcaagtaggtttgggattaattgtcggacttaccttgtatttaagtccggatgtggtaatccgtgaaaatatcgaagtacatactccgggacaggagatggaagtgatacacggaacgaatgacttgaaatcgactcaaacaacgattcctttcttcaagagcaataacctcgactatgccgacctggtctctttcatgggtgaacacgcgcagacagccgggtggatattgttcgttatcatcacaatcttcgtggtgaccgccgtatcaaacggtgccaacctgaatgacggaatggatggaatggccgcaggtaattccgccataatcggcgccacgctcggtatcctggcatacgtatcgtcgcacatcgagtttgcaagttatctgaacattatgtatattccggggtcggaagaactcgtaatttatatctgcgccttcatcggtgcattgatcggcttcctgtggtataacgcttatccggcacaagtatttatgggagatacgggtagcctcactatcggtggtatcattgccgttttcgctatcatcatccacaaagaattactcataccgattctttgcggtgtattcctggtagagaatttatcggctatcctgcaacgggtttactacaagctgggaaaacggaaaggagtgaagcagcggttattcaaacgggcaccgatccacgaccatttccgtacttccatgagcctgatagaaccgggatgtacagtgaaatttaccaagcccgaccaattgtttcacgaatcaaagattaccgtccgtttctggattgtaacgattgtgctggcagcaataacaataataacgcttaagataagataacctccggcccttgtcggttgtcggaagcgggtttccgttcggaaatccaacgatatatagagagtattaacccgattattaacttttaaaagatgtgcccaacgaataagcaactcagcatattggaaacaagagcacattattgtagatgaaaagaattgtaatattaggagctggcgaaagcggcgcaggtgcagccgtgcttgccaaagttaaaggatttgagacatttgtttcggacatgtccgctatcaaggacaagtataaggaacttctggacagccacgctattgcctgggaagaaggacaccacaccgaagaactcattctgaatgccgatgaggttgtcaaaagccccggtatcccgaatgacgctccactcatcctgaaactgaaagctcaaggaacgccggttatctcagaaattgagtttgccggacgctatactgatgccaaaatgatttgtatcaccggttctaacggaaaaacaaccaccacttccctgatttaccatattttcaagagtgcaggtctgaatgtaggtttggcaggcaacattggcaagagccttgctttgcaggtagccgaagatcatcatgactattatatcatcgaattgagttctttccagttggacaatatgtataacttccgtgcgaatatcgccgtattaatgaatatcacaccggatcatctggaccgctacgaccactgtatgcagaattacattgatgccaaattccgcattacacaaaaccagacaccggacgacgccttcatcttctggaatgacgaccctatcatcagacacgagcttgccaagcacggtctgaaagctcatttgtatccttttgctgccgtcaaagaggacggagctattgcctatgtagaagaccatgaggtaaaaatcaccgaaccgattgcctttaacatggaacaggaagaactggcattgacaggacagcataatttatataactcattagctgccggtatctcggcaaacctggccggcattgccaaagagaacatccgcaaggctctctctgacttcaggggagtggaacatcggttggaaaaagtggcgcgtgtccgcggcattgattttatcaatgactcaaaagcgacgaatgtcaactcctgctggtatgccctgcaaagcatgactaccaaaacggtattgattctcggcggcaaagacaaaggcaacgactatactgagatcgaggatttggtacgtgaaaagtgctctgccctggtatacctgggactccacaacgagaaactccatgacttcttcgaccgcttcggtttgcccgtagctgatgtacaaaccggaatgaaggatgccgtagaagcagcctacaaactggcaaagaaaggtgaaaccgtattattaagcccttgctgcgcttctttcgacctcttcaacagttatgaagaccgtggcgaccagttcaagaaatacgtaagggagttgtaatacgaagaaagccgtaatgttgtaatcaataattcgtaatagacaaagtggatttattaaagaacatattcaaaggcgacaaggtaatctggattatcttcctctgtctctgcctcatctcaatcattgaggtgttttcggcagcttcgacactgacctacaaaagtggtgaccactggggaccgattacacagcattccatcatcctaatggtaggtgccgtagtagtggtgtttctgcacaatgtcccctacaaatggtttcaggtatttccggtatttctatatccggtttcccttgttctattggcattcgtcacgttaatgggtatcattacgggcgaccgtgtcaacggagcagcccgctggatgactttcatgggattacagttccaaccgtcggaactagccaaaatggctgtcatcattgcagtttcgtttatcctgtcgaagaaacaggatgaatatggcgccaatcccaaagcctttaaatacatcatgattcttaccggactggtcttcatacttattgcaccggaaaacctgtcaacggctatgctgttattcggtgtagtgtgcatgatgatgttcatcggacgggtatctgcaaaaaaactgttcggaatgctgggattgctggcacttgtaggtggggtcgccgtaggaatactaatggctatccctgccaagacactgcacaacactccgggactccaccgtttcgaaacctggcagaaccgtgtttccggcttcttcgataaggaagaggttcccgccgccaagttcgatattgataaagacgcacagattgcacatgcacgtattgccattgccaccagccacgtagtaggcaaaggtccgggaaactccatacaacgcgacttcctcagccaggctttttctgactttatcttcgctattgtagtcgaagaaatgggactgataggaggcatattcgtggtcttcctttatctatggctattgatgcgcgccggacgaatcgcacagaaatgcgaacggactttccccgccttcctcgtcatgggtattgccttactgctagtatcacaggccatattgaacatgatggttgccgtcggactattccccgtcacgggacagccgttgcctctggtcagcaagggaggaacaagtacgttgattaactgcgcttatatcggaatgatattaagcgtgagccgatataccgctcatctggaagaacagaaagagcatgatgcacaacttcaactgcaaattgaaacaaatgccgcagattccgaagcacaggcggctgccgaaccgacagcacagattctgaacagcgacgccaagtttgaagatgaaaatgatatcaataaagggtgaacaaggtctgtaaacgatgaatggtgaatgatgaacggtaaacggagaacaacggatagaagaaaggattattatggaaaaagaacttagaatcatcattagcggtggaggtacaggaggacatatcttcccagctgtttccattgcgaacgctataacggaactgcgtcctgacgcaaagatactctttgtaggagccgaagggcgtatggagatgcagcgggttcccgatgcaggctacgaaatcatcggtctgccgatagcgggatttgaccgcaaacgcttatggaagaatgtagctgtactcgtgaagttggcacgcagccaatggaaagcacgaagcattatcaaaaacttcctcccgcaagtggcagtcggtgtaggcggatacgccagtggtcctacattaaagacagccggcatgatgggagttcctactttaatccaagaacagaactcgtatgcaggagttaccaataaattgcttgcacagaaagcgagaaagatttgcgttgcttatgacggaatggagaagttcttccctgccgacaagattatcatgacgggaaatccggtccgccagaatctgacgaaggacataccttctaaagaggatgcactacactctttccacttacagccggataaaaagacaatcctgattgtaggcggcagcttaggagcaggtactatcaacaaaacgctgaccaccggactgtctgctatcaaagagaacagtgatgtccagtttatctggcaaaccgggaaatactattatccgcaagtaacggaagccgtaaaagcggcgggagaaaccccgaatttatatgtgacggatttcatcaaggatatggcagcagcgtatgcagcggccgatcttgtaatctcccgtgccggagccggttctatttccgaattctgccttttgcacaagccggttatcctggtaccttcgcccaacgtagcagaagaccaccagaccaaaaacgcactggcattggtaaacaagcaagcggccatttatgtaaaagacagtgaagcggaaaccaatttattggatgtagccctgtctacagtcaaagatgaacagaaactgaaagaactaagtgaaaatattgccagattagctttacccgattctgcaaaaatcattgcacaggaggttatcaaactggcggaaaaagaataataaaaaaagcaatgaatatagaaacgataaaatcagtctatttcgtaggtgccggcggcatcggaatgagtgcacttgtacgttacttccttttcaaaggcaaagtagtggcaggctacgaccgtacccctactccactgactgaaaccctgatcgccgaaggcgcacaaatacattacgaagaaaacatcgacctgattccggaagcctgcaaggacaaggaaagtacgctcgtcgtattcactcccgccgttccgcaggaacacgaagaactggtttatttccgtaacaacggattcgaaatacagaaacgcgcccaagtgctgggaacaatcactcattcgagcaaaggcttatgcgtagcaggaactcatggcaagaccaccacgtcgaccatgactgcccacctgctccaccagtcgcacgtggaatgtaccgccttcctcggaggaatctcaaagaactacggcaccaacttgctgctttctcaaaaaagcccttacacggtcattgaagcagacgagttcgaccgttctttccattggctatccccttatatgtccgttatcacggccacagatcccgaccatttggatatttacggtacagaacaggcctatctggaaagtttcgagcattacacaactctcattcaaccgggcggcgcattgattatccgtaaaggcatctccctgcaaccgaaagtgcaacccggcgtccgtgtctacaactattcacgtgacgaaggagacttccatgccgaaaacatccgcatcggaaacggagaaatattcatcgacttcgtagccccggatacccggatcaacgacatccagttaggaatcccagtaagtatcaacattgagaacggagtagctgccatggcattggcacacctgaacggagtgaccgatgaagaaatcaaaaaaggcatggccagcttccgcggagtagaccgccggttcgacttcaagataaagaacgaccgggtagtcttcctgagcgactatgcacatcatccctctgaaatcaaacagagcgtgttgtccatgcgcgaactctataaggacaagaagatcacagctatcttccagccacatctatatacccgcacacgcgacttttatcaagactttgccgacagcctctcgctgctcgacgaagtaattctggtagatatctatccggcacgcgaagcaccgattccgggcatcaccagcaaactgatttatgataacctccgcccgggtatcgaaaaaagtatgtgtaaaaaagaagatatactgaacattctgaaagataaaaacattgaagtattaattactctgggagcaggagacatcgacaactatgtccccgaaatatgtaaaatcctcgaaaaccgataaagcttatggtaaagagaatccttctatccattgtcatgctggcgctcatagcctaccttatcgtagctatcaccgccttcaaccgcaagcctgccgaccagacctgccgtgacatggaacttgtcatcaaggataccgcttacgccggcttcatcactaaagacgagctgaaagggatccttcagcaaaaagggatctaccctatcggaaagaaaatggaacgtatctctaccaaatcattggaacgggaactgagcaagcacccgctcatcgaccaggcagagtgttacaaaactcccagcggcaaagtttgcgtagaagtaacccaacgcatccctatcctccgggtgatgagttccaacggcgagaattactatctcgacaacaaaggaactgtgatgccaccggaggcaaaatgcgtcgcccaccgggtaattgtcactggaaacgtagaaaagtcgtttgcaatgaaggatttatataagtttggtgtatttttgcataacaataagttctgggatgctctgatagaacaaatccacgtgttgcccgaccgcaacatcgaactggttccccgtgtgggagaccacctcgtctatctcggcaaactggacaactttgaagacaagctggcacgtctgaaagagttttataagaaaggactcaatcaggtaggctggaataaatattcacgcatcaacctcgagttcagcaaccagataatttgtacgaaacgagaaaataaaaaataaagagatatggcaacaacagaatttatcgccgctattgaacttggttcatcgaagataaccggtgtggccggaaaaaagaacagtgacggaagtatgcaggtattagcgtatgcccaggaagactcttctacgtttatccgtaaaggggtgatcttcaacctggacaagacggcgcaaagcctgacttctatcattaaccgactggaaggtgagttgaagaactcaattgccaaagtatatgtaggcatcggcggacagtcactccgcacagtccgtaatgtagtaagtcgcgatctggaagaagaagctatcatatcggaagaactcgtaagcgctatcggcgacgagaacattgccgttccggtggtcgacatggatatattggacgtagccccgcaggaatacaaggtcggcaacaacctgcaagccaatccggtgggcctggtaggtagccacatcgagggacgcttcctcaatatcgtagcccgcacctctgtccgaaagaatctggagcactgcttccaacaggcgaaaatcgacattgccgaccaattgatcgctccgttggtaactgccaatgccgtactgaccgaaagcgaacgtcgttcaggttgtgcgctcgttgacttcggagcagatacaaccactatctctgtatataaaaacaatatactccgcttcctaacagtactaccgttgggaggaaacagtatcacccgtgacatcacttccctgcaaatggaggaagaagaagcggaacgtctgaaaaaagcatacggagacgccttctacgaggaggaggaagatcaggaagaagctacctgcaaactggatgacgacagccgcacgatcaaagtaagcgacctcaacaatatcgtcgaagcccgtgcagaagaaatcattgccaatgtttggaatcaggttcagctatccggctacgaagacaagctgctagcaggaatcatcatgacaggaggagccgccaacctgaagaatctggacgaaatgttgcgcaaacgcagcaagatagaaaagatcagaatggcgaaacttccacgtaatacagtccatgctccaagcaacgtactgaaaaaggatggttcgcagaacacactgttcggcctcctgttcgaaggaaaccagaactgttgtctgacggaaactgctgctccgcagtctcccgtaactccgaaaccggaaccggaagtacacaaaactgtcgacatgtttgaggacgaccaggaactgaaagaacaagcccgcatcgcccggctcaagaaagaggaagaagaaagagaggccaagatagcagctaaggaagcagaaaaacttcgcaagcagaaggaaaaggaagagaaagaaagaaggaaaagagaagccggtccgagctggattcagcgcaagatcgactcgttgacgaaagagatattctctgacgacgacatgaaataactctccgaaacgaagcttgtaatttataattagtaatcagcaataacctataagaattatggacgagatagtacaattcgatttcccgacagactcaccgaagatcattaaagtaattggtgtaggtggtggtggcggtaacgccgtaaaccacatgtaccgggaaggcatacatgacgtgacgttcgttctttgcaatacggacaatcaggcactggcggaatcacccgttccggtgaaactgcaactgggccgtagcatcacccaagggcttggagccggcaaccgtcccgaacgggcacgcgacgccgccgaagaaagtatagaagacatccgcaaccaattgaacgacggcaccaaaatggtatttatcaccgccggaatgggaggaggaaccggaaccggagccgcccccgtcattgcccgcatcgcgaaggaaatggatattctaacggtcggcattgtcaccattccattcatcttcgaaggagaaaagaaaatcattcaggcactggacggcgtagaacgcattgcccaacatgttgatgccttactggttatcaacaatgaacgcctgcgcgaaatatatgccgaccttacttttatgaatgctttcggcaaagctgatgacacactttccattgctgccaagagtatcgccgagattattacgatgcgtggtacagtcaacttagactttgccgatgtgaagactattttgaaagatggtggtgtggcaattatgagtaccggattcggcgaaggtgagaatcgtgtcaccaaagctatcgacgacgccctgcactctccgctgctcaacaataacgatattttcaatgccaagaaggtaatgctgaacgtttctttctgcccgtcgtccgagttgatgatggaggagatgaacgaaatacacgagttcatgagcaaattccgcgaaggtgtggaagtcatctggggggttgctattgacaattcattggaaacgaaggttaagattaccgtacttgccaccggattcggcgtagaagacgttcccggcatggatagcttgcacgctgcacgcagccaggaagaggaagaacgccaattacaacttgaagaggaaaaggagaaaaacaaagaacgtatccgcaaagcatacggagaaagcgccagcggcatcggcagcaagagcttacgcaaacgccgccacatctacctctttaatacagaggacttggataacgatgatatcatcgccatggtagaagattctcctacttatcagcgcgacaagacgactctaaccaaaatcaggacaaaagccgcccttgaagaggaagtagctacggaagaagctatggacgacaacggagttatcactttctaaattaacttataacataaagatatggatttatttgatcaggtcagcgaagacattaaaaacgcaatgaaggcgaaagacaaagtagccctcgaaactttgagaaatataaagaagttctttttggaagcaaaaaccgctccgggtgccaacgatacattgacggacgatgcagctctgaaaatcatccagaaactagtgaaacaaggaaaagactctgccgaaatttatataggacaaggacgtcaagaccttgcagatacagaattggcacaagtcgctgtaatggaaaagttccttccgaaacaaatgaccgctgaagagctggaagctgcactgaaggaaattattgccgagacaggtgctaccagtggaaaagacatgggcaaagttatgggagttgcctccaaaaaattggcaggacttgcggaaggacgtgctatttctgccaaagtaaaagagcttttgggataaattcccactctttacaagagattttattggttcttcgtcaaatttggtggtaatttaaccagtcggtggtatctccattcccctccttcgggaaggagaatgttgaatactatcgattatcaaattattattttcctaattaattttaccaccaaatttgaagcagaactattttatttcagttttatcttgcaccttacactaatcatgggttatctatttgattaatagcagcataatccagtgcaagataccgttgcagatgtgtgcaagatgtttttaccttacacacatctgcaacttttttttatagtgggaaaactactcccacacttaccttcccaataaagacatacggataaagcattagttcagagtgttgaaacactttgtttcagcagcttgaaacaaaatgtttagtgccttgaaacaatatatttatcggtgtgaaacaaagtgtttctctacgggaaacaaatcttggcatggctgattaaacagccccaaccgacattcgccgtttcaaaacccgacagtagcaattatgatccctcaaattaaaacaatcaccaatataaggaatccattccttttagttatggagataatgataaaaataatcgaacaaacttattttcctcattatcaatccggaacaaaatttcagaaaaaatgtatggtatccgaagatatttcataggtgttaacaacaaaaaagataactacttttgttatagtctctgactaatatgtaaaataaacaagcttatgaaacaaaaaggtaataaaaaagggtttaccggatgtgcccaagcctatatccggaagttacaagaagaaggtcgcttttcgacagcgcacgtatataaaaatgcggttctttcattcaccaaattttgcactactcccaacattgcattcggacagatcacccgcgataatctgagacgatacggacagtatctctatgaacacgggctaaagccgaacaccgtatcgacatatatgcgtatgttacgcagtatatataatcgtggcgtagaagcaggtattgcccgcttcattccccggctgttccgggatgtgtacacaggtgtagatgtacgccaaaagaaagcactacctgccggcgaattgcatacgcttctctataagcctcctcactccgagcacctgaagcagacacaagccatcgcacggctgatgtttcaattttgcggcatgccattcgcagacttcgcacatttagagaaatcggcattagaacatgggatcctcaggtacaaccgcataaaaacgggtacgcccatgagcctcgaaattctggatgtatcaaagcaagaaatgaataagttacgcaataacaactcaccgaaagaaaattatccggactatctatttaatataatgaaaggtgacaaacaacggaaagatgaagctatttataaggaataccagtctgcactccgccggttcaataatcaactgaaaagcctgtcaagagaattacgcctaaaatcaaccgtcacttcatatactctacgacattcctgggcaacaaacgcaaaatatcaaggaatctccattgagatgattagcgaatcactaggacacaaatccataaggaccacgcagacttatttgaaggggttcggattaaaagaaaggacagaggccaacaaattgaattgttcttacatcgaatcttataaagcaagtaattattaactcataacactctagatacaaacactttaccttatctgttacttcttaggtaacggatataaatatggcacaaagatatataaaaagaatctcacaatccaaatgaatcatactttattttagttttttctttgaaaaaataaaataacaggcaagaacatgaagcattcttcttttcatgttccaactttctattgctgaccaccgaacaattttccatccgaaagcagctaagtatattttatttataaaagaccgctgtctttatcctatttttactttgcacgttcatgtcctaatatcagaattccgttacctaagaagtaacagatacacataaacaaaaaattatgacacacaagcctaaaatcaataaatatctgtggctatctgccggcaaaagttggagatttacgacaagcacaagacataagctggtcgtcctttttgtctttgctttatgcatcctgcccgcaaacctctgcggacaaagtttggccatcaaaagcaatctgctttatgaccttactacctcactcaatttaggaggagaaatccgttgtgacgatacacacactttcagcctttctgtcaattacaacccatggaatttcagtggaaacaaaaagatgaagcatttcctcgtgcaaccggaataccgcaaatggctgaacgaggcatttacaggaagttttatcggcttacaagttcactacgccttatacaattttgggggaatgctcccttggggattcggaaacgggaaaatgctgggcatagaaaaccgacaaattgccaacaaccgttatcaaggcaatctggcaggattcgggatttcctacggctatcaatggatgattagcccgcaatggaatatggaagcaggaatatcgctgggatatgcccatctcaactataaacgatacggacaacccgcaggtgctcccctgatagaaaaatcaaactgtaactattgggggcctacacaaatagggatatcagtcgtgtatttcatccaataattcaacctaataaacgcataaaatgaaaacgaaaacattcatcctactcagcttattgatatgcaatctgcttccggcccaaaacgtcaagctggatatcaaaccccacttcctcggagtacgggcagactcattattcgtatcaatggacatatcagtagaaatagaggacatgaacccgaaaaacgccgtcatactgacccccattctaaccgggcaagaccggaaaatattattaccggccatacaactgaacggtaaacagaaacaaaaattatatgtacgcaaccagatactacgtaaaaagaaaaacagtaaggaaagcaatacagcataccttgtgacaggcattgatgatgaacattcgcgtaccatagcctatcaaacctcactaccggcagagcagtggatgaatgatgccgcgctctatctgagaagaacgattgtcagaccggaaagcgaacagactctaaaagatacattaattctcgcaccacaatatgcagtgcttccacccaatgtaacggcaaccgatataccggctcaggaaatatctgccacgacgatgtccaccaatagtatgccctccatttcgcctactccggttaataaaaaactgaagtataaaggttcatatatttctccggcttcggacgacgtagatatccgcaatcaaaaagaactgaacttcaatcttgaagaggccaaaattatggctgatatcaatccgcagatgttatcgctccgtgaattatatacggtagcattgtcatacgcggacaataaaacgaaattctatcagattatcaatatcagtgtcaagctgtatcccgtacatcccgttgccaaccttaatgccgctgccgccgccattgaacagggagatacgaaatcggcaagcaaattcctttcaatggcactacacgagggactggcctataaaagttgccggggagtatatgaattgatgaccggaaacacgtatgaaggtatccgtatattgaaagcagccaaagctgaaggttctgaagaagccgcatataatctgaatgttttttttgagaacaataaacgtccttaaccggcagacacaatgagatatttcataaccctactcatattatttggttgtcttgacggctattcacagaaagtagccgtcaggctcaatgcgcttccggcaacagacggagccttcggagccggagtctcttatgggatagggaataaaagcactgtcgagttggccggaagcttacggccatggaagcgaagcgaaatgtacgtgaaccgttactggttgatacaacctgaatataaatactggacttgtcaaaagttcaacggatttttctggggagggtatctcaatggagcgcaattcaacgtcggagggaaaaaactacctttcggcatattcgctgacctcaagaaatatcggtacgagggctggctcatcgggggtggcatcagttgcggataccactggatgctaaatgaccactggaacgtagaaacgagtctcggagtaggatatgatttcatccgttacaagcagtataattgtgtcaggaaatgtgcaggactacgcaataaaggacagtatcattatatagggcccagcaaagcctctgtaagcttagtttatctattttaaagagaagaacagtatgagaagtatatggaaagtttggttttcaaaacgaagaaagatttattttcggatagcacgcaaattccatactaccccatggaaagtctatcggttgggacatggtggaatgagcaagaataagaaagatataaaaatattggaagagttacaacgatatggagtaatctcctatatctacccttggtgatattatcacataaaaatgaaaaaatatagtttactacaagtatgaaaacaggaggtttttttattattacgattattctatccctttcgatacaggctcaaacggttgtaacgaaagagacaggaactattcgtccaacttcctccagtttgtataaggcggggaaagaactggtggtttctatttcaatagatatcacacgggatctctcgtccaatgaatcaatggtactggttcctattgtctgcgatactctggaacatcggttgaaactgcctccgatttatatcaacagccggaaacaacatattgttttcctacgggagacaagtaaaaaagaaaagtctgctcaagcattacaaaggaaaaacgggaataagcagacgatgcattatttgcaatccgttccattcgagcaatggatgaatcaggctaccctctcgctaatagagaagagttgcggctgtggcattcccgacgcggaagatttcatctgcattgcccgtttacatccacggcctacattcgttccgcaacttgccttcctgaccccgcaagttgaaacatcaaagatcagaacggaaaaaggttccgcattcattgattttcctgtcaatgtaactgctattcataaagaattcagcaataacgtaatagaactgaataagatcattgaaacaatcaacactgtaaaaaacgacagcaatgtaagcatcacacgcatcagcattcatggatatgcatcacctgacggtccgcttcaactaaacgagcgactggctcgcgaacgtacccggaccttgaaggaatatgtatcccaactatacccattcgacggcaaatacatacatacgacctacacacctgaagactgggagggttttgaggcacttcttagcgacacaacttttcaagacaaagaagctatcatgaaaattgtgacaagcaatatgcatcccgaccgtaaagaagaaataataagaatgaggtttccggcattctaccgttttgtattgaaacactggtttgtcatactgagacattccgactataccgtcgagtaccacgtacgtccgtttacaatagaagaatcacaaaaagtattcgatacaaatcctaaaaatctcagtttggaagagatgtttcgtctcgcactcacatatacaccgggaagtgcaacttacaacaagatttttatgactgccgtacaattgtttccggacaatcctacggccaatctgaatgctgcctgtatagcattgatacaaaaagacacaaaaaccgcagccgtctttctcgaaaaagctccgccattaccggaaacgacgctggccaaaggtgtcttatgtttcctgcaaggcaactttaaagaagcagaggcactattccggcagtcgaaagacgcaggactgttacaagccgacgataacttaaaacagattttagaagtaaaataattattcaattaaactcaaaacaaaatgaaaagattcacacaactaatgtcactgttgtttatggcagcagtcacacagtacagttgcatcaatgatgcagatgtagctttttccgatgagagccacacggattcaaacggcaatcttgccctattctttgaaatccccaatgagaaccacactcgcagcgccgaatcatcaggcgtgacagagactggctcaaaggatgaatatgcagtaaaaagtctgacagtctatctgttcgattcgaccactaaaagtctgaaagaccaacaagaactgaagaacatcagacaggtcaaaggagaaggggaaaatatacagtataccgctgacagaattaccgtaaatccgggcacatacaatatctttgccattgccaacgggaaagcaatcaccaaagaaatcaccatgcaagacgatttcttaaatgctgtcgatgaagtaacgtacagtacaggaaagattccaaatgtacccacagagggttttgttatgacaaaccgtggtgcagccaacctgaacatagagataagcaagcctactgactcggacaagataaccaatgtatctatcggtcttgagcgtgccgttgccaaaatcgaactgacccaaaaacaagagacttttcccctgaaagatcccaacggagaggtgtattgtaccataaaactcaacacattcagaatgttgaacctggcaactaaattctacacattccgccacacagccacattgaatagctttcaggagccggcttcgtatacggaagaaaactttggtgacattcccgatgtcaacggttatctaatcgatccttatttcttcaagaaaacagtggaaggtgccaaagatttcacaaatgccgacggtttcttcgcacaagcattagtagatactgacatcaacgacaataactgggcaggtatggcaccagccaatagctggtcatacatttactgtctggagaactgtatgttcgttgatgcacaattgaatgcatacagtaccggagtaatgttcaaagccaacatggacatcgccactaaccgcgttttcgacgaaaatggtaccaatataaacaatccgtccaactggcctaccaagatgttctatttcaattataacttctacatcagtgtagatgcaatacgtaaacaggttctgaataacttaccgtcagatgtcacagacgattcggacacagagactcttgccaaatacagtatcaaacgtttccagaaaacagaaaactactcatgttactacaactactggatcaagcacgaggataattatgaatctacagaaatgggtgtaatggaattcggtattgtccgtaataatatatatcgtctgtctgtcagcaaagtggcaggactcggtagtggagatccttacattgagccggaacaaccggacgaatataaggccgaactggacatcaatatcaatgtttttccatgggccgtacgtaatcaagatgtagaacttgaataagtagtaccggccaactgaattaaaatcatcataaatgcgttcatttctactacatattatctgcattgtcgcgttgttctcgtcctgtgattgggtgaatgacgatttatcagactgtcctacaggaacttggttaaagatatcatatacctataacatcctgaacgtggacgctgcatctacgcaggtaggcgacattaccattcttgccttcgacaagaatgacaagtatgtggatcgattggacgtagacagtataacattacatcaaggctactgcatggtaagactaccgtttcccgaagaaacttatcacctgcttatatggggagggatatccggctaccagtatcagctcccgaatctcaaggctggacagactgaacggaaatctctgaatatatcgctggcatgtgacaataagaatcagtttaacaggaaactgaatgcactctttcacagtagccttgaaaatattactatcagtgaagaatatcaggtcatcactgccggactggtgaaaaatacgaattacttctcgtgtatcctacaggatgagaacactcttcctctacgacaagaggacttcgctttcaccctagaatccaccaacggtgtaatagactatacaaatactcctgtcggcacaactccgacctgttatcttccatatcgacaggaactgtctctgacttccgaacaaatccccatcattcacgccagattaaatacactgcgcatcatgaagggagacgacacaacattatcaataaaacatacaccaagcgggaaaactattctgcacctaccactcacccaatatttattgttatcaaaaaattatcctaataacataggtgacataagtgatcaagaatatcttgaccgagaagattcttacacactcatgttctttatacaatcatcggacacggggattccgaggattccaacaatgaaagtaaacgactggattatacgtctgaatgattctgaactaggatcatagaaaattaagaaataagtatttatacaacataatataggtgagatgtaaaaaaggctactgtgaagtacccaagcgggcttttgccctcatagcatataaatattcccactcaaataaaacggcataatctttgagaaaccgttttattcattgtttgttttgtttgtattaagtgcatccattccaagagaggaacggatgcactgtttgttttatagatgaccggaatatcaaagccttatcaacttctgaaataatagaattaaagaagctatatgaaaacaatacagcctttcatcttttgtcatggaaccgatatccaagccccagcatcagattgttgggatccttaaacttgctcaactggtatccaacgtgcaggaacaagtggcgtgtgacataagttttgagagctagaatctggtagaatccctgcgtatcatctccatggcataccagattccgtcctagcccggcattgattgagaaaatgggcattaccagttctgcacggagggacaaccccactgcaaattgctcgcgaaaaggaggacgatgaaactttaaatcgcccgaataacttccttccaatttataatctttgatattggcactctcgtcatactgcgcatccacagaaagacccgcccgaaaatagttgttgaagttatacattggagcaaagttgagacctgcaataccaaacgaaccgggaaccagactcggtatattgtcctttacgaatcccctcttacgagtggcaccgtatattaccagatcataactgacatgcggctttataaatacccgcttgggggatactgttccgagtgtctcatccgcatctccaaaggtgcgtacaatgccgactctcccaccgatcacattgagtccaccattaggataatgcgtgtttccgttagaaaaatgtgtgaagtccacacctgcggccaatttccattgcggatgaagctgccagttcaagataaaccccagattgatgtatgcattgattttagaaccgataacctcattctgcggattatatagcccgtcatatttcttccaaccgaaagaagcaccgaaattccactcgtaatcaaatgacaagagaggcgaaagttgtacaataggtgccccctgaaaagcatataccaccaccggatttccaagttcagcgggagagtggaaggtattataagatacacctatcccctgataggcatgggggtacagccggcctaatcgggaatctttattgaaccggaaagcatacttcagatgtagggaaagtgactggtcaatggtcttctgccgtgcattatctccttccagaaagctgtttgtcggagctacataccccggacgaatatcaaaaccaatctgatgcttcacaattgtctgagccttcagattcccgccaactacagaaatcgtcaacagacaaataatgtatagtaaccgtccggtattcatatctttagtcatttgatattttctcgtgttatgtaatatgcagcaggcattttattttgcaacgtgccgtttatggtccgccgttccccggtctttgggtgaacagcatagagggcgtatctagtttcaaaccagtaatactctatcagcacagtgatacgctgggtcgtataaggtggaatagagacttctatctgttccgtattggaaaaaggtaatgtttgctgcttggaagtatatcgcacctgtttaccgttcatctgcaaatgaccgttttctacgcttggtatctctactgtcaggttactttctcccaatagttgaaaaagttccggcatgtcgcttctgaacatcacttcatgataaacattctcgtaaggagacagtaaacacggatagtcaataccccagccattaggttgcacaaaactcctttttgcttcgattcttttctcataagaatcctcgtctaaagaataataagtgatatgatcaatcacatacctgtccgatggtgaaatatcaacgtatatctcctgagactcatattcgttgctcaccgtgagtttgaattgaaagtgagtagaacgggcattctcttctactgcaatcttcagttcccggggattactacgttcgatagtgaaaccgatcaattcctcattgcacacaatcttaccctgtcctttaaggtatggaaattggtccgttgttatcagatcaccatccgcatcatacactgcatacgaataggtaaaaccttcatcatacgtatacactcccaatacgtcccaattggaagaagcaaaccgaatgattttggtatcgccattgccatccaaagtcagttcggaatcggcagaccggaaatcgtcaacaaatacatcaccgttacaaccataaaacaccaatagaataagaatatattccgttaagtttatgaatatcttcatgttgtttagctctagtcattacattgaggacaaaagtaatatatatttttagaactcaatggctttaaccgatgtaaaaatataactaaagttacatacaacaagcgaataacaaatctaatcaaacaattctttcaatacttccagtgatttcaaagccgggaaatccggcagatgcaagcgataatagtcattcataatggtcaggcaacgagcacgttccgcacgactcatgccgaaaagatgcattgtttcataattcatgcgcatcaactggcggagtcgccctgcctcctcaggattaatataggaagaatgcagttggggacgaatggaagtgaaacaggcattcagcaaatcaaaataatcgcctgtatggtagtcttccaaattagggtaaagccccaaaaagcgggaaagtctcatcaaaaacaccagatgaaaattggcaaaacctcccccacactcatccagccaaataattgaatgttgcaaataagcgaacaaaggacgattctctgcctcctcccgaactgcccgatagaggaactctgacaagaaaagtgccattgaagatttatacgggtcatagggaatagaagaaaagggataaaaagatttcgcctccttgatgcgataaagtgtcgcattcggacgataatcggcctcaaactcaatgaaagacaacggttggaacagaacagacttcactgccgcctttcgcgaacgaggtactgcgacaagaaacgaagcccttccggacaactccgtatacatatctacaatgatagaagtatcattatatttgagcgtatgaagaactattccttttgtcttttgcagcatatacttgcatatttcaatccggtagcaaaactacaaaaaaaatgcgaccaatgccctatttcatcctgaaacagtctttttaatcttccgtacttttaagaatccaaaacacataataaccagaagtaaaccaatgagcccccctcttatgagccagaaagtgaatgtagattctccttggcctacttcatctataaagccgaactcacttttacatccggcttcctgaagaatctgttgataaagcagtttcatatcgtaggccttatccgtagcaataaagaatttgccactctctatcttacaattcacataaggagctgtaagaatgacaccattgaataagaatccgatatgcttgcctattgacttttccgtcgcttcagcccaagtcgttttatgagagtcgtccaatactccgagaatacggtaagccatattgtcctcgttcgagtccgacactgaatccagttttatccttgcgaaatctttcactgtcacaatcgggtctgccgacaaactgtcatgctccatatcaatcacataataccagccgttaggacggacagaagtactctcaaatgaagaaaagccgcaccaaagaagcaacaaaaaaaagataaataaaatagttctcataatatatttaatttagagtgattatcggaaatagttagtaaataggaacataagctattcaatcagttattttgtatcatatcttccagccttctcaattctttattcgcttcaaggagttgtcccactttccgatataaatgccggaatacaaagatatcaagaatgaccagcaacaacacaatacctacaataatacatccccgtacaagagtagcataaatgatgaaccaggcaaggaacggaacaaaagcaacataagtactgatgtatccccaataaagcgatgatttatactgcaaaacatgaagaatctggcgttccaaatcatatttcatgcatcctgcttgtttgagtttataatactgaaacagatttatcccgaagggtaccgagatggcaataaagaatactatatccgacatggccaggaaaaaggggtcaatcagaatgtaaactaaaacattcaaaaacaaaaaaaacagaatccccagagagatccgttcataccataataaccggttatagctggtcattctcttctttgcgagcatttcttcaacttgctgcctttcgacaacttcctgacagttgatcttatcattaaattgtccccatgccttttttagttcatcaaattccatattatattctatttatcggttcgacatctttttcagtttctctttaatacgatgaatacggatggccacattattgcgacccactcctactatttccgctatttcatcataacttttttcatccaaccaaagcataatatacatcttatctacattatctaattgatgtataagctgatacagatgtttcatgcattcgtcatgttcgcaatcatccagtatatctatgtcttgtttcaatggtacataatcataattcttctttttccgcaggtttgtgatgcaagtgttgagtgtaatccgatatatccatgtgctcacgctactatgacctttaaagttccgaaagctcttccacaaactaagaacgacatcctgatacaaatcattaatatcatcattgtccctcgcatacataaaacatatcttataaatgatacgtttgttctgcaatagcatatctataaattctttattgtcattcatcgttcttagcatttgtcccgttagtcgtcaaaataatcatttagttacaaagagaaacataaaaaactgcatttttatgactttgcagatttcttttttaaaccggattacattcttacaaagaaaaaacaagttcgcgatttaaatcggaaataaactttcctatatattaaggtatacaagtatatatacttcccggtatttttaagagagcgtacattttctcacaaaaaaatctgccatttattccactgattttcaatataaaacaaaacatcaagagaaaaaaacgactattttatcgaaaaaaatttaatgaatagtttgtcagtttcaaaaaagttcctacctttgcatccgcaatcgagaaacaaacactgattcgagaaagcaaaatgcagaaatgcaacaacaggatggcccgttcgtctatcggttaggacgcaagattttcattcttgaaaggggggttcgattcccccacgggctacaagtaaaaagaataaagaactaaaaaaatagattagtcgaaatggcaaatcataaatcatcactgaaaagaatcagacaagaagagactagaagacttcataacagatactatggtaagaccatgagaaatgctgttagaaagcttcgcgcaactacagacaaagctgaagcagttgcaatgtatccgggcattacaaagatgttggataagttggctaaagtgaacattattcacaaaaataaagctaacaatctgaaatctaagctcgctctttatatcaacaagctcgcttaatacataggaatttaacaattctatatagcatcaggctgaacttttaagttcggcctttactgtgtatagacacttgactatcaagtctatcgtaaaagtacagaatccactttcattcttcatttttcacggtttattcttcgccaagtcgacaaatttcactatatttgctctgttattaaagttagaaaggcaattatgagcgaagaacaaatcactcccaataacgggtcttattctgcggatagtatccaagtattggaaggtcttgaagcagtgagaaaacgccctgcgatgtacatcggtgacatcagtataaagggacttcaccatttggtatacgaaatcgttgacaactctatcgacgaagctttggccggctattgcgaccatatcgaagtaacgatcaacgaagacaattcaatcacagtacaggacaacggacgcggtattccggtcgactatcatgaaaaagaaaagaagtcggcactggaagtagcaatgactgtcctacacgccggaggtaaattcgacaaaggttcctataaagtatccggaggtttgcacggtgtaggtatgtcttgtgtaaacgcgctgtctactcacatgactacgcaagtattccgcaacggtaagatctaccagcaggaatatgaaataggcaaaccgctatattcggtaaaggaagtcggcactgccgacattacgggaacccgccaacagttttggccggatgataccatttttacagaaacggtatatgattacaagatcttggcttcacgactacgcgagttggcttacttgaacgccggcctgcgtatcacgctgacagatcgccgggtagtgaatgaggacggtagcttcaaaagtgaacagttctattcggaagaaggactgagagaatttgtacgtttcatcgagtcttcacgcgaacacttgattaatgacgtgatttacctgaactccgaaaaacagggaatccccattgaagtagcaatcatgtacaatacagggttctcggaaaacgttcactcttacgttaataatatcaatacgattgaaggtggtacgcacctcgccggtttccgccgtgcactgacccgtacactgaaaaaatatgccgaagacagcaagatgttggaaaaggtaaaagtagaaatctcgggagacgacttccgcgaaggtctaactgctgttatttccgtaaaagtagctgaacctcagtttgagggacaaacgaaaacgaagttgggtaacaacgaagtcatgggtgccgtagaccaggccgtaggtgaagttttgtcatactacctggaagaacatccgaaggaagcaaaaacgattgtagacaaagtgatcctggctgctacagcacgccacgcagcaagaaaagcccgtgaaatggtacaacgtaaatctccgatgtccggtggtggtttgccgggtaagctggcagactgttcggataaagatccgtcaaaatgcgagttattcctcgtcgagggtgattcggcaggtggtaccgccaagcaaggacgtaaccgtatgttccaggcaatccttccgcttcgcggtaagattctgaatgttgagaaagcgatgtatcacaaagcgctggaaagtgacgaaatccgtaacatctataccgcattgggtgtcactatcggaaccgaggatgacagtaaagaggccaatattgaaaaactgcgttaccacaagattatcatcatgaccgatgccgatgtcgatggttctcacatcgacacactgattatgacgttcttcttccgctatatgccgcagatcattcaaaacggttatctgtacatcgctactcccccgctctatctctgcaaaaagggtaaagtagaagaatattgctggacagatgcacaacgccagaagtttattgatacttacggcggcggttcggaaaatgcaatccatacacaacgttacaaaggtttgggtgaaatgaatgcccaacagttgtgggaaacaactatggaccctgaaaaccgtatgctgaaacaagtgaatatcgataacgctgcagaagctgactacatcttctctatgttaatgggtgaagacgtaggaccacgccgagagtttattgaagaaaacgcaacgtatgcgaatatcgatacataatattaattttacgtttttataaaccaacctcacatcttacaacgaggaaacgccgatggagaaagagcatccttcgatcggcgtttttctttatccatatcttaataaagactaaagacagtaacattttcagtgctaaatcactatattgcaaaaaacatagaaaacagtagctatgaagatgaaaactactaacccgttattcgcaaagatcagactatttcttattgtcctgacattgtgcgttatcgttacctgcatctttctggtcatcattcatccggaagcatggatagcaccagtatgtgtaatggccgtagcactatgcatcttgctatatcaggtatttggcacacgtaagaaataggaagtttagataaaatgttgctttttcaattcttcggcaacagcttcaagttctttgtaccattcttcaccgaatttacgaatcaaaggttctttcagaaatttatagacagggacattctctttttttcctaacagaaccgcagccttgcatacatcccaacgatgataattcaccgctttataaggtccgtaatctccaatgcgaataggataaagatgacatgatatcggtttatagaaatctgtttttccttcccggaaagctttttcaatagcacagtagcaacatcctttctcgtcataacaagtaaagacgcagtctttgttatttacaatagaagttaccaagtctccttcctggtcagtatataccaccccctgtttttctatcaccgcacgcgcttccggagccagttcatcccagataaccggcaacacttcctccagtttcatcacctcatccagttctaccggtgctccggcatctccctcaatgcaacattcacctttacaggcatccaagttacaaagaaatttctcctgaagtacatcaagcgatacaactacatcattaatctgaatcataaaacttatgtgagacaaaaaaggcggagttctactccgccctcccagttatagaaatctaaattacttaatcaaaacattcccgttcatttcagccggagcttccagtcccataatcttcaggatagttggagcaacgtctgccagacggccatcttctactttcgcagctttgttttctgttacgtaaacacaaggaaccggattcaaagagtgggcagtattcggagtaccgtcttcattcaaagcatggtcagcattaccatggtcagcgataatgattgcttcgtaatcctgtgctttagcggcttcgattacatctttcacacaagcatcaacagcaacaacagctttttcgattgcttcgtaaatgccggtatgacctaccatatcaccgttagcaaagtttactacgatgaagtcatatttgttttcattgatagcagccaccagtttgtcttttacttcgtaagcgctcatttccggcttcaagtcgtaagtagcaactttcggagacggaacaagaatacggtcttcgttatcgtacggagtttcacggccaccgttgaagaagaatgttacgtgagcatacttttctgtttctgcaatatggagttgattcagtcccttagcagcaaggtattcacccaacgtattagaaacgttttctttatcgaataagatgtgtacacctttgaaagaagcgtcatacggagtcatacagtaatattgcagtcccgggattgtacgcataccaacttccggcatatcttgttgagtcaatactactgtcaactctttcgcacggtcgttacggtagttgaagaagattactacatctccttctttgattgttccgtcgaaattagcatttacaatcggtttgataaattcgtctgtcacgccttcatcataagattcctgcattgcctgaaccatatcggcagctttcttaccttcaccttttactaacaaatcataggcttctttcacacgttcccaacgtttgtcacggtccatagcataataacgaccgatgattgaagcaatctttcctgctgacttttcacagtgcgcagatagttcttcgataaaacctttaccgctcttcggatcagtatcacgaccgtccataaagcagtggatgaatgtattgtcgatattatattctttagcgatgtcgcaaagtttgaagagatgaacgagtgaactatgtacgccaccgttagaagtcagccccataaagtgaacattctttccattttcttttgcataagaaaaagcagcgacaatctcaggattcttcagaatactattatcagcgcaagcacggttgatttttactaaatcctgataaaccacacgtccggcaccgatattcaagtgaccgacttccgagttacccatttgtccgtcgggcaaacctacgttttcaccgcttgcctgaagctgggaatgagggtaagtattcatcagataatcccaataaggagtgggagtgttgaagattacgtcgtctttcttttggtcgcctaatccccaaccgtcgaggatcattaaaagggctttcttactcataatatttcaatatttaaattatcactctgattttccggctgcaaaggtacaaaaaagatgattacctgaacgtttaatctatgttaagttgcagagtaaaagaatacaaggctatggatattttccttactttgtaaggatagtattaaacacgttcatcaaaaaactattattatgaaagcaaccttattctgcattttacttgtattatcgggcatactaagtgcacaaacaatcgacaatcctcctttcaaagcccgttcgggaagtatctccaacattacccgcatagaacgtactccagaaagtacacgagtatacatacatgctatttttcgtccgcactggtggattaaagaaaaaggaacaagttacctggaagatgcaaccaccggaaagaaatataagtttaaaggtgcagaaggtatcgaaatcaataaagaagtatatatgcctgattccggtgaaaaagactacgtgcttattttcgaacccctgcctgaagaaactcaaacgatccaccttctcagcccgactaattatgaagggaatacatacgatatttccttgattccgcagaaaggaaagaatactcctccactagctgccgtcaagggtaactggttcaagacagacggctccggtcagtgggaatacggaatttacgattcaatcacgatcatgaataatcggatatacaccaatgaaagtatccgcaagaaagggaaacgaattgagatgaccgttaaagacaaacaaaatgggactatccgtacattgttgataaccccgcaaaagagtggcaactgtattataaaaacagaccaaacaaatgaattatcgtatacccgccaaaaggctgccataagcacaatagagccggacaatggttttcaacagttcttccgtaaagataccgcctgtctgcaaggatatatcgatggctacgacccgcgtttgggattcgagacaggacttgtttatctatcaaatgaactcacccgtgaagattatcctactgttgtgcaaatagataaagacggaagttttacatgcaagttcgttattcatcatccggtagagcaatcattaaccctcaacaatgactggattccattctatattgagcctggacaaactctcaccatgtacattgactgggaagcaatcatggctcgaagccgtgcacgcgatcattattttccgattaacaatatagcatatatgggaccgacagctcccttctcctatatactatccgattttagcaagtctattccttatcggtacgaagatttatccaaatcacaaaagacacttactcccaaccaatacaaggaacacatgagacctatcatcgcacaatggagacatattgccgattccgtatgccgggtctaccacccctccctgaaggcagtttgcctgattaaaaacaaagtaaaactgcaaacaggaaatgcattcttcgattttgcaatgagcagggattattatgccaaacaagatacggccaatcaagccttgaaagtaaaggaagatgattcgtattacgatttcctaaaagagatgccacttgacgataaaacaattctcgcagatgagaaagcggacatcttcaccaatcgctttgaatttatggctcccctccaaaaagcttattcggatgaagtcgaaggatcggtggagattccttttacttacccagaaaagcctctcttgacattcctgaaagaaaaaggagtgaaacttaatgctgaacaagaagcgataaggcaaaaacaggaaaaacttgccggacaagaaataaaaataacgcttgcagaacttcaagaagatgacaggaagaccagtgctctatttaaacaagaagaaaaactggtaaaagaatacatggactatatcaataaacagaaaccttctcaaaaagaaaagtcacagcaagaagaagatagggccagcataacaatggaacagaaatatgaagagaagaaaaatgccattatcgcccggctatgcaatactcccaatcctctgctctggcaaatagccaaagtacgccgtctcacttatgacctacaaaatataaaaacaaaaacaattgcccgtgaatatatagacagcctcaagcaagaatttaccgcccccttcttagttgccgaaactgaacaattgtttgaaaatgcttatccttcggaagatgctaaatcataccaactcccggaaggcaaagcaaccgacattttccgcaatatcatcaagaatcatccgggcaaagtactatttgttgacttttgggccactagctgcgggccttgccgtagcggaatagaagcaacagcagacttgcgcaagaagtacaaagatcatccggagttccagtttatttatatcactggagaaagagaatctccggcaggagcttacaaacaatatgtcgaaaagcatctgaaaggagaagcaagttattatgtcaccggaacggaatataattacctccgccaacttttccatttcaacggcattcctcattacgaactcgtagagaaagacggcagtatctccaatgaaaaattaagtagttacagtatcggacaatatttgaagaaacgtttcggtacttccgaaccttcggaaacagagcagcacgcagagtaagtacggactgcaaacagtagaaattcgaaaaaaacggtgcaaaagaatggaagccagcttgattttccgtacctttgcaccgcttttacattaaaatcatagaaatatggacgattcaaacccgcgaacgtgcacaactagtattaattaaagcgaacagagtcattgaagtctgatgtctctgctcgtgctaaacaaacgaaaggagacaataagatgagaacgtatctttattgtgaggccggctttgtggaaaaagcacaatggcttcctaatagctgggtaaacgtagtatgcccgaacaatgatgactttgaatttctgactaaaacactcaacgtacccgaatcatttcttgatgacatagccgacacggatgaacgtccgcgtacggatacggaaggtaactggctgttaacgatcctgcgtatccctgtgcaaaacaagcagaacggaagcctgcctttcgccactgtacctatcggcataatcacaaacaacgagattatagtatccgtatgttatcataacaccgatttactaccggatttcatcgaacatacccgtaggaaaggtattgtagtccgtaataaactcgatctgattctccggttgatttactcttccgccgtatggttcctgaaatatctgaaacaaatcaatatagatatcagtgcagcagagaaggagttggaacgcagcatccgtaatgaagacctgctccgtctgatgagattgcagaaaaccttggtttacttcaacacctccattcgtggcaatgaagtgatgataggtaaacttaagactattttccaggatacggattttctggataaagagttagtggaagacgttatcatcgaattgaaacaagcactcaatacggtgaacatttacagcgacattctcactgggacaatggacgccttcgcctccattatctcaaacaatgtgaatactatcatgaaacgtatgaccagcttgtctatcgtcttaatgctccctacattgattgccagtttttatggcatgaacgtagatattcatctggaagaagtgccctttgctttttctttgattgtactcttctctatcggattgtccacgctggcgtttgtgatattcagaaagatcaaatggttctaacatacaaaagcctgtcatctactattgagtaaatgacaggctgtaatttaataatacgttttttcttctatagagaattaattaaaagagaatgtttagagagagaaattattttttatccttgtttactttttcttccacccaacggaatagaaactccaacaaatccattaacagtgttagagttctttcctaagaacatatagtcggttccgaggaacaacggccctaatttcagaccaagaccgaaagattttcctgctgactgaatggcagaatagctaagtgcaacgttaaaccagcttttcggacgataatttgcagagaatgtcaactctgtaagagcgtcaggttgtacaaaacgagtggtagacaatacaccaacagctaatttgttattgaagaaaccgtattctgcacccaacaccaatgtagaagccagacgggacttacgagattcttttgcatcacctacttcgagttgcaacatatcatagtcgagtacatcaccgttagttacacgatccatatacccttgagtatcatcctgcaactgctttactgcattcatcacagatgtttcaggattagcgggatcgaccattgctgcataagtacttcctttaatatcaataggatccggattggctgacgcaatcttcgtacttgattttgaccaagagataaaacctaagtcaagaatagatgcagatacagtcagattatccaatattttataagaagcacccaaatcaataccaaaaccgtaaccagcgatacccaatttgccactatcaaattcgaagtctgttacataatccttaccctcttcttcttgtaattccaaacctttgaaagaactcttcaattctgcaccaacattcaaatttgcatggtaattatcaaattttgctttcaattcagtagcttgtttaatagcttctggttggcttaagccactccaataattttcatctgaccactttgcaatctctgcatcactgggcagattagcactcattgccacatttttgagttttaactccatattaccgatacccaacaaagctttcactctggcaccgactgtcaaacgactgttaatctgacgtgagagtcctaaaccaatttcagtataagcattgatattcaattgctgaccactgatatcatagttactgtttctccagttttcttcaacagtctccatctcattcaggaaagtaaacatagatttagtcaagttcgcaccaatatcggtacgaagaccaatgttgaacgaccagaagttctttcctttgtaccaaccggcagaaaggatttccgtactaaagttcacattcaacttattgttatctttcagccggttcatgaaatccggtttcgtatagaaatcatctccgtcatcaataatatcaataatatcctgatatcctaatgaagtagaccccacggttgcattaactgcaccaaccaccggaagattgaagtaacctttagtcggtgtcaaagccggattcagctgttgacgataatgcgtaccttccataaaataagaagtacgcaagaactgtgcatttgcaggaagtgcacaaactaacataatgaaaaataccccaatgagcttagtagagcttagtagcttgttcgttgccatgattttaaactttttaattcttattattgtttgcaaatatatagcatttcaataacaattaaaagcacggagcaacacttttttagcctaaacagaacaattcaagcactaaacaggctaaaatcgtgcttatactgcaaaaaaatgtagaaaatataatttaagaaaggaacaacgggaattaaaagtccaaagaaagttgttcacctcccaacaaattgaacgtcatccgatgataaggagttgttccatgttcggcaatggcggcacggtgttttttggtaggataccctttattacggttccagtcataatagggatactcttcgtggagacggttcatataatcatcacgatacgttttggccagaatagatgcagcagctatcgaaaggtattttccgtcgcctttgattaccgtggtatgcgggataccgggatatttattgaaccggtttccgtcaatgagcaggtgttcgggacgggtggacagttgatcgacagcacgatgcatggccaggaaagaagcacgcaggatatttatctcatctatctcttcgggtgaaacgatacccaccgcccatgctatcgcttcacgttctattacctcacgcagagcataacgttgtttctccgtcagttgcttggagtcattcagtaactcattcttaaaatctttcggaagaatgacggcagcagcatagacagaacccgccaaacagccgcggcctgcctcatcgcaccctgcttctatcagattctcatttaaataaggtaatagcatctttatcgtttttatctctgcaaaggtaaatgaaataaaaaaggagacctagattccggtctcctttttcttatctttttaacacaaaatccttagaacagactccaggcaaccgtaagtcctgccattacaatggctaccatgctcataagctttatcaatatattcaagctcggaccggaggtatctttaaacgggtcgcccaccgtatcgcccaccaccgttgccttatgaacctcacttccttttcctccgaaattgccttcttccacatatttctttgcattatcccaggcaccaccggcatttgccataaagatagcgagcacgaaaccgctgctcaaaccaccgatcaacaaaccaagcacaccgggaacaccgaagacaagtcccgtaaagatcggggcaatgatagcaatcaatgaaggaagcaccatttcgcgctgtgcccccttcgtagagatttccacacaacgttcgtagtccggttcggcttctcccgtcaggataccttttatttcacggaactggcggcgcacttcgtccaccatgtgtcctgccgcacgtcccgcgccattcatggtcagcccgcagaacaggaaagccatcatagagccgaggaacatccccgaaagtaccttcggattcatcaggttcacttcataatagttcatgaagtcaatgaaagtagcatttgccacactgattgtatttccgtccgagaaagtcagatccatattgccgagacgagtcagtccgatacgtatttcttcaatataagaagcgagcaaagccaatcccgtcaaggcagcagaaccaatcgcaaaaccttttccggttgcggcagtcgtgtttccgagagaatcgagcgcatcggtacgtttgcgaacttcttcacccaagccggacatttccgcgtttccgcctgcgttatccgcaatcgggccgtaagcgtccgttgccaaagtgattcccagcgtagaaagcataccgacggcagcaatgccgattccgtacaaccccataccgatattggcaaaatcgccggcagcagccagtagataagaagcaatgatacccaccacaactgcaataacggggatagccgtagaaagcattcccagaccgatgccggaaatgatgaccgtagcaggtcccgtcttcccgctttcactcaacttctgagtaggacgataggattgggaagtataatattcagtagaacggcctatcacaatgccgacaagcaggccgacaaccaccgcacaggagatccaaacccagttctgcaactgcaaaagccacaggataaagaaagtagcaacgacgataagtacagaactgaggtttgtaccgaacgccagcgaaccaagcagatctttcatcttcgcattctctttggtacggacggcgaagatacctataatagaaaggataatcccgacagccgcaatcaacatcggagcaataaccgctttgaactgcatagccgtgtccgaagaatgaataaaggcggcagcaccaagcgcggcagttgccaggatcgaaccgcaataagattcgtacaagtcggctcccatgccggccacgtcacccacgttgtcacctacgttatcggcaatagtggcagggttgcgcgggtcgtcttcggggattccggcctctaccttacctacaaggtcggcccccacatcggcagctttcgtatagataccaccgccgacacgggcgaagagtgcctgagtggaggcccccataccgaaagtaagcatggtggtagtgattacacagagtttatgagtcggtgtcagtgcgtcagcaggaatcacttcgttcagcaacaaataccagaaagaaatgtcgagcaggccgagaccgactacgacaagtcccattaccgcaccgctccgaaaggcaatcctcaatccggcattcagcgaaccgcgtgccgcattggctgtacgggctgatgcataagttgccgttttcatccccagaaaaccggaaaggccggaaaagaaaccacccgtcaggaaagcgataggcacccaagcattctgaacgtggaaaccgtaggccatgattgaaaacaaaatgaccagccccagaaacacccagcctacaatcttgtattgctgtttcaggtaagacatagcgcctttgcgcacagcagcggcaatttttatcatttggggagtaccttcactctccttcatcatttgcttatggaagtaataagcaaagcagagggctaacacggaagcgaccggaaccagccagaaaagaatgctatccataggattaatttttaaagggtttacggaggctaaaagtatgaaaatcaagcgaaaaaagcaagtaagtaagattattttttgaacagtagatgtactcactttaattgccatgtcattcctccctttccggcaagcagcttgtcggagggtttgttaagtgggactttatgggaagagaagccggtatagttcgattggaataccggtatagttaggttggagcaccgctttagttagtctgccacggctgtggagagtattcgtcacacccgtggtaatatctcgtcacgcttgtggaaagaactctccacggccgtggcaaattaactaaagcggtattccgacagaacaatacctaccggataacagatgtatagcgggtgtataagctatgtttaacggtgacttatttaccgtagaatttagtgtcagcatcaaaatctggcccgtacatcataaattatcattatctttgagcgtttttatgcctgttaactaactaatacccaataattattactcaaaacaacatgaagaaactatttctactactaatggctttgtttaccttggcacaagtgaaagcccaggaaaagagtgttatccaaatctcaacggacaacacagacctaatccttcaagtagcccctaacggccgactttatcaggcttatctgggtgacaaactactaaatgagcaagatatcaagcacttttcgccttatgtaaaaggtggcagtgacggcagtgtttctacacgcggctgggaagtctatccgggttccggtgccgaagactatttcgaaccggctgtggctatcactcacagcgacggaaatccaagtacgattctccgctatgtatcttccgagcagaaggccgtgacaggaggaacagagacaattatcaacctcaaagacgaccaatatccggtagaggtaactctgcactacatcgcttatccgaaagaaaacgtcatcaagacatggagcgaaatcaagcacaacgagaagaaacccgtcaccctgtggcgctatgcttccacaatgctttatttctccgactccaagtatttcctaaccgagttcagcagcgactgggccaaagaagctcaaatgagcagccagcagttacagttcggaaagaaagtaatcgacaccaagttgggcagccgtgccgccatgcatacacatccgttcttcgaactgggattcggacaatcggcacaggaaacacaaggccgcgtgatgctgggtacgatcggctggaccggtaacttccagtttacattcgaagtagacaacgttggtaacctgcgcgtaatccctgccatcaacccttatgcatctgattatgaattgaaagcgaacgaagtattcacgactcccgaatttatgttcactttcagcaataacggaacgggcgaggccagccgtaaccttcacgcctgggctcgcaactatcagctgaaagacggacaaggtgaccgcctctccctactgaacaactgggaaaacacttacttcaaattcgacgaacaactcctttccgaactaatgaaagaggccaaacatcttggggtagatatgttcctgctcgatgacggctggtttggcaacaagcatccgcgcaacagcgacaatgccggactaggcgattgggaagcaatgaaatccaaactgcccggcggtatccctgctcttgtgaaatccgctaaagaagccggagtgaagttcggcatctggattgagccggaaatggtcaacccgaaaagcgaactctttgaaaagcaccccgactgggctatcaccctgccgaaccgcaagacttattactatcgtaaccaactggttctcgacctcagcaacccgaaagtgcaggatttcgtgttcggcgtagtcgacaacatcctgactgagaatccggaagttgcctatttcaagtgggactgcaactcaccgatcaccaacgtctattctccctacctgaaaaacaaacagggacaactttatatcgaccatgtacgcggcatatacaatgtactcaaacgtgtgaaagagaaatatcccaatacaccgatgatgctctgctccggtggcggcgcacgttgcgactacgaggccctgaaatatttcacagaattctggtgcagtgacaataccgacccgatagaacgtctgtttatccaatggggattctcacaaatcttcccttccaaagcgatgtctgcacacgtgactagctggaacaagaagacaagcgtgaaattccgtaccgatgtagccagtatgtgcaaactgggcttcgacctcggactgaaagagttgaatgcggacgaactgacttactgccagaatgcagttgccaactggacacgtctgaagaaagtgattctggacggcgaccaatacagactggtctctccttatgacggcaaccacatgtccgtgatgtacaccgcaccggataagaacaaggctgtgctttatacttatgacattcatccgcgctatgctgagaaactgcttccggtgaaacttcagggattggatccgagtaagaggtataaggtgaaagaaatcaatctgatgccgaacaagaagtcgaatctgggcgctaacgagaaaacttattccggcgactatctgatgaaaataggtatcaacgccttcacaaccaatcaggctttcagccgtgtgattgagctgactgcggaataagagacaacttcccatttcgcaggcaacctgtccttctcaagaggttaatcaggttgcctgcgaaaaatttctttaaaaaagtgaggagtaaaaccgacttctcccattatggtaatgtcactgcttgataaatagggccaacaatataagcagtaatattaattttaatccaaagaacattaccatgaaaaactccggatattgtttaagcctcatctgcctctttatatcgttgtgtctatacggatgtaaagataacgcggaagaaagtataacggaaatctttgaaatcgcgacagaggatctgatacagaacttcagtaaagatgcagcaaacgtcagcatctctatcaccacaaacttaaacgtagataattgggaagcgaaggttactgataaatggctcagagccacacaattcaaaaacagtctgaaaatatcagtagacgccaatatcggttcgaacagacgtaccgccaacgttaaagtatcctctgcaactaaacattataccattacagtcacccaatattccgccagtgacattgtaatcgaagaagatatacaggtaaaaccctatgccggtaaggcgagcgaagaggaaacggacccggaccggagcatcgagcattcctttgatgataaatttattgccgacggcggagtaccttaccacagtaaatggggacaatcggccgatttcccggttatcctggaatactatttcgagggtaatacggatattgattatttcatctatcacactaattcaggaaacggcacattcgggaaatttgacgtatatacgcagacgaaagaaaacacggaatacgtgcatcagggaagctatgacttcaatatgcgcaactctccctccattgcctcactcaaaactccggtaaaagccacgaaagtaaagtttgaggttcatagcgggaaaaacggatatgtcagttgtgatgaaatgcagttcttcaaaaagaacaagaaaaacactctcgaagaacagttgctgactgtctttacagatattacctgttccgaaataaaacctgatgtcacgcaagagcagatagaagcattacccgaattcttcatacaaacggcatcggctttaaaagacgatagttataataaatgggaaaaggaattccggatacgggaatattgtccttacagctccgccgacgaatgggcggataagctgatgacgaggaaatacggagatctcgacaatcctacaggaatctatgtgaacgaaggagatgaggtagtcgtactggtaggagacactcacgggcaaagtatttcaatccagaatatcggggaagaaacaagcaaaggttatgcacaaacttctgtcaacggtgatatctatcccctgaaggaaggagtcaacaaactgacagccaagcaaacaggtatgttgtttgtaatgtacaatacgaacatacaaaaccccgatgcacaaccgattaaaatccatatcccattaggcggaggcaaagtatgcggattcttttccttaaaagagcatcagaccaatgagaaatacaaggagttaatagacaaagccgactataaatatttctgtgtcatcggcaacgccatcatcctctattttcatcataagcaactgaaagcagcagtgccgtatgatatcctgtcgtctatcgaactttgggacaatatgatccaatggcaacaagaattgatgggtattgaagacgtataccccaaacaaatgaataatcatatttttgccatatctcccgaaggcggatatatgtgggcttcggaaggcaggataggatttgtatataccgttctgggggatatcctgcgcaaatcttatcttatggcctccagaaattcctggggaccggcacacgagatcggtcatgtacatcaaggtgccattaactgggccagcacaacagagtcctccaacaatttattctccaattacacgatttataagttcggtcagaactgctcccgagggacagaactagctgtaccggaatatgcggctaacgtcaagaaagccacattggtattcagaagatgtgtagaaaataaagcctggtgcgactttggaaccgactatcagggagaggacccggaaatgcatgcacgcatgaactggcaattatggaattactatcatcgctgcggatataatccccaattcttccctactcttttcaaattgatgcgcgaaaaccgtgtatcaacccaagacccgggagaaaatcaaatgatgtatgccagaatggcttgccgggctgctaacgagaacctgacagatttctttgaaaggtgggggttctttgtcccgatctctatgaaggtcaaccaatacggtacgtacaattacattgtcacggacgccatgattaaggaaacgaaagaatttatgaagcagtttccggctcccaaacacgctttctactatctggaagacagaaagaaaggtgaccccggactcgatacgactccaccggatgtcggttacttcactcaatttgcagaggacatgaaaatcaccaagcaaattacttatactatatccggacatcaggtgaatgttcaaaacggagaacaggcagtagcttttgaaataaaagagaatgataacctgaaatatttcggtacttctttccagtttgaaattcccaatactatttcaccggatcgtgtcaaattatacgctgtacaagcggacggtgtacgaatcgaaatgactcgtaaataaaatcaatgattagtatggccctattaatcaacagtatatatttataatcaataacaatctaaaaaaaacaccatgagaaaagtcttactattcgtgtgcctgttaatggcaggaatgacagtcaacgtaaacgctgcaaaacaaaaagccaagcacgtcatcttaatcggtatggacggttggggggcttacagtgtccctaaagcggatatcccggctatcaaaagtctgatgaccaacggatgttacacacttcatagccggagcgtactcccttcttcgagtgctatcaactgggcttccatgtttatgggagtgggaacagagttacatggatacaccacctggggctcgaaaactccggagatcccttcacgtgaggtcaacgaacgggggatcgctcctaccattttttctgtcttgcgcgaacagcgtcctaaagccgaaatcggttgtttgtatgaatggcccggaatcaaatacctggtagatacgttagccatgagttaccaatatcagactccgggatacgccaaagctcccactgccttatgtgaagcagcagagaagtatattattgaaaagaaaccggaactgctggctatctgcttcgaagaacccgaccacaccggacataccaaagggcatgacactccggcctactatcagatgttgaaagaactggatggatatgtggaacgtatcctgcaagctattaaaaaagccggtatatgggatgacaccattattattatgacggccgaccacggtggtatcgaaaccgggcatggcggcaagacactgagggaaatggagattccatttattatttccggcaagaatgtccgcaaaggcatggaaatcaaagaaagtatgatgcaatatgacactgcggcaatgattgcctatatactagggctgaagcagcctcaatcttggattggacgtccagtaaagacggttttcaaataagaccattactataatagttacttatattacaaaaagaatatggatactgcaaatcacacaaggcggagaaagtccggccatgttttcttgcagtatccatatcacataaatatccgttcaaactagtcttctttttatagtaaacagaaatcatcattagctctccgatataatttaatttattttttatacttttgccacatgttgctacaaaatacaacagttgttaatcattctagtacaattataacaaagtacacagagtacacgtgtatgaaggagagtaaaatgcattatcaaactaaagaggatgcggaattatgggttctgctaatcaaaggagacaagctggctttagaaataatgtaccggcgttactttccgcacctgttgaattatggacatacaatctccacaaacgaagaattaataaaagattgtattcaggatctctttgtcaacgtattcaacaactctaaattccgccccatagaccatgtcaaatcttacttatatacagcccttagaaacaatctcgtatataagatgtcctcgatgaaagagacgtaccagttagaaaatgcagagtttgagattccattgacagatgatgaactggaaggactctttgcacacgacgatacttatctggaaagaagcaaattgctaaaggaggcctaccggaaattatccgccaatcagcgtcatgccgtttatttgtactatatcaaagaacttacatgggaggaagttgccgaaatactaggtattacagtgcactcatccatgaacctgatagggagagctattgtcaaattacgacgtttatttgaaaataaataatttttttccataaaagtgaggagtaaattcgtttttcccattataataacagaacagtcgaatgatgaaagaagaaaaaggaaatattgaacaaatgagcgaacggttgttccactaccttcgaaagagagaaagttccgcttcccaagaagcagaagacgaggtatggagcaaaatcagtgagcaaatagacaagaagaagcatattcccgtctatcgctggcttataccggtgacagctgttgctgctgcttctctcctgtttgtattctggctgaataatcaagcttatgatacgattcattcggcagatgttcaagagtttgtatctgctgcaaatactccggagaaacatattgagctgattacggctaccggaacaaagataaaagtagatgaaaaagctaccgtggcttatgcacaagacggttctttattaatcgacgagaagaaaatcgcgacccgacagagtaccggggaaggagaagaagaacatcccatgaaccagattattgtaccaatggggaaacatatcaaattacaattgtctgatggctctcaactggatattaattccggaacgaaggttgtttatccccaaaagttcaaaaaggaataccgggaaatattcgtcgaaggagaaatattcatagatgtgactcataaggaaagtaacatcccctttatagtaaagacatcgctctttactgtaaatgtgctgggtactgccttcaacgtaaaagcttataaagaagatactaaagccgaagtcgtattagtacggggaaaggtggaggtaaaagacaaaaaggaacagaattatacgctgatgcctaatgagctgattgctctgaatgaaggaacatatactgacaagaaaaaagtcaatgcgctcgattatatcagctggattgacggcattctgacattgaataatcaggcactaagtatagtattagagcagttacaccgctattacggaaaagaaattatttatgatacaggtatagaaacaatgccgatgcacgggaaacttgatttgaatgaagggttacagaaagtattgtcaactattgccataacggcacctgttaccatagaagaaaagaataatatatattatgtccacatgagaaaagaaaactaattattaatcttaaaaacatcgaatatgcctatgatatgaaaacacacgaaaaatccgaataatattcgtagtattattcggattagctaaaaacattacctatcaacattaagtagcgttcttaaaattacaaaattatggaaaactgtaaatttactacaaacaggagtgttaaaagatacaaattcctgtttgtattggcaattcttttatcatctttcttatctgtctatgcagaagacgtctctaactatgtagaggaaaaaacattcacattcagtttcgagaatgtacctctaaaacaagtactgagccatattgagaaaaatagcgaatttatcttcgtctattacggagaaaccattaatcccaaccgcaaggtatctattaaagtaacgaaccaaccaattcgtccggtactcgacaaactatttaaaggtatgtcggtagaatatacaatagacaacaggcagattacactcaaaaaagtagctcaaaagaaagttcaaccgcaaagttctaaaagaaaaacaatacaaggatttgtattggataaggacgagcaaccgatcactggggcaactattaaaattaaagacagcacgacaggtgctctgacggacattgaaggtttctacaaacttgaacttgaggaagaaaatccggtcctgatagtctcatttatgggatatatcacccaagaagtgaaagtcggaaagaagagtatactcaacatccaactggaagaagacactaaggcattggatgaggttgtagtcacagcctttggtatcgggcagaaaaaggaaagtcttgtcggagctatccaacagatacgcccggaacagctaagagtgccttcctcacgtttatcttcttcttttgcgggacgtttatcaggagttatcgccgtacaacgaagtggcgaaccgggagcagacggcgccagtttctggattcgtggtgcttctacattcagtggcgcaactgatcctctcatcatcctggacggtgtggaaattgacgcaacccaactgaacaatctcgatcctgaagtaattgaaagcttctcaatactaaaagatgcaacggcaacagcactctatggaacaagaggagctaacggagtgatggtagtcacgacaaagaatggggaaaatctgaaaaagccgatcattaactttagagtggaaggggctatatcacagttgacaaatgttcctaaaatggtagacggtatcacttatatgagattatacaatgaggcacagacacgtactcccgagactaccgatatctattcggacgaaaagattaatgctacaatagacggtgtcaatccttatatgtatcccaacatcgattggtacaacgagatgttcaagaaaaacacttttgccgaacggttcaactttaatatccgtggcggaagcagccgggtagattattttatgagtgcaagcgtcaagcacagcgacggtaatcttaaatcactcagtaaagacttctactccttcaacaacaatatcaatgtctacaactatgattttgtcaataatctgaatatcaaggcaaccaatacaactaaaatatcgctaggactaaatgtgtcggtacgagactggagcgggccttatagtagtgccggaagcgtattctcaagtgcactcaatgcaaatccggtagactttccgatccgtttccccggccaggaagatgacactcacatccgttggggaggaagatctggtgctccgaacggaagttatgtcaatcctgtcgccgattttgtatccggttacagttccacgtactctacaagtgtaacagccaacctgcgttttaatcaggacttgaagatgattatgaaaggactgaaactgaatgctattgtttcatattacaactattcatattctaaagtgtatcgttattgcaacgtcaaccaatatgagacttccatgtataatccacaagaagatacatacgacttaaacatcatcggcaacgaacaaagtaccgagcttaaaaccggaggttccaatagcggtaaccgtagattatatctacaagccagcctggattataacagaacattcaatgacgtgcacaaagtcaatgtcatgttcctatataatcaagaacagaatgacgttaacaacccttcggacttgctgacatccttacctagaaggaaacaaggtatagcaggacgtttatcttacggatttgccggcagatacttagccgagttcaactttggctacaatggttctgaaaacttcccgaagaataaaaagttcggtttcttcccttcagtagcaatcggatacaatctgtctgaagagaaattctgggaaccgctcagaaacatcatcccgcaatttaaaataagagcatcgtgggggcttgtcggtaatgaccagacaggagccggacgttttacgttccttgagaaccttactaactccggagccggattcacaaccgggaccggtaaccagacacacaccaactccggtcctgtatggaaaagatatgccaatccgaacctgacatgggaggttggtgagaaatggaatgccggtattgatgtgagaatattgaaaggattcagtttctctgccgacattttcaaagaagtgagaaaggaaatctttatggatcgtggaacaattccgacactcatgggacttggtaatgttacagttcaaggaaatctcggaaagatgcgtaactggggaatagataccagtgtagactacaacaaccagattaacaaagacttgtttgtctctttcaagggaacgttcacctttgctcataataaaatacttgaaatggatgagccggaattcagtttatatcctaaccgtctgaaagtcggccattcactcaatacaatcttcggatatgtagcggacggattatttaccgacgaaaatatgattaacaatagtttgccgcaacaatttgccaatctgccgctaatgcccggtgatattaagtacaaagatattccgaatgcattaggaggtacggacaatgcaatcaatgaatatgacaaagttgccttaggttatcccagtgtaccggaaattgtatatggtttcggcccttccattaaatacaagaatctggacttctctttattctttcagggaaccggacgcgtatcattaatgatgagcggattccatcctttcaccaacgataacaataccgccaaaagaggcatattagattacgtagcagatggatgctggacaacagataatcctaatccgaatgcgtcataccccagactcacgacggcatataacacaaataataaccagaattcaacattctggctgagaaacgccgcttttttaaagctcaagaatgcggaaataggatataatttcaagaatatgagaatttatgtcagcggcaacaacctgctaacattctctaaattcaaattatgggatccagaaatgggaggtggctccggtatgtcctatcctactcaaagaacatttaatgttggttttcagatgactattaactgataaatatataataaaatatgaaactgagatatatttacatcattgtattatgcatcttaacaagcggatgcaattatctggatataatgccggatgaacgtgccaaactggaagactcttacaacactccgtccaaaaccgaagggtttctctattcgtgttatacttatatgccgatgaaccgcagttctcaagattcacagccgtaccgaagctggtacccgacagcattactgaccggaggagaagtaactacttattataaagctaacgaaccggaacagttgttcacaatgggactttataacccgactaacaattcaatcgtttccgaccgttggtggccgacatggaaaggagtccgccaatgctatgaatttctggatattctggataaagcccaagtttatactgaagccgatcgggagatatatagagcagaagctaagtttctaattgcttattatcatttctgttctttgcaggcattcggtcccactctcatcatcaggaagaaatatgatttggacaccaaattatctgaattaccggcacgaagttcttacgatgaagtagtagcttttattgatcaaatgcttgatgaagcaatgccggggctggttgaagctcataatccgatgtatttcggacgggcaaccaaacatgttgcacgcgctctccgctcccgtgtacacttatacgccgcctcacctttattcaacggaaacagtgagttttacagtaacttcgttgacgaaaatgggaaacatctaatttcacagacatacgacgtcaagaaatgggagaagtgtgcggaagtgacattggatgctattcagaatgcggaaaaagcaggctacaaactatacggagatgttgaagccggagctccaacccaagaaaaaccgggattcacagaccagaccgaaagcggaaaagctcagcgcagagtcagatattgtacgattgacaaccagaacctatgtgaaatcatctggggagataaccgaagcgaatcaacatacggtgtacaaattcgttcgtcagtcagacagacaaaacagatcccgtacacgcagactaactctactgcacctaccttgcagatggtcgaactcttttatacagagcatggattacctatcgataaagacaagacctatgactatcctaaccgttatcaaatagcttatctacctgcaaactttgacgggaataattatgaagacagaccgaatgaccgctctatcaaactacattttaaccgtgaaccacgtttctattcatggataggattccataacggtaactacgaaatagcacgatataatgcagaagcacttcctttgaacaaatcttatgtacccggcggattaagaatgttgttcaatggagcacatggtttcaaaaaagatatgacggtgcactattcggtaacaggatatcttaacaagaagttcacacatcccggattcactaatgccattatcaaatatccattccccacattccggctggcggaactgtacttgaattatgccgaagccttgatcgagattgggggaagcaataatctcaagatcgctaaagaatatatggataaagtaaggaaacgcgcaggcatcccgggagtagatgagtctattcagaaatatgcaaatgatgaatggaaaggaaaagaaaatgaacaggaaactttacgccaatttgtccgccaggaacgacaaatagaattctatctggaaggacaacgtttttgggatttgagacgttggaaaatagcggaaaaactggatgaacctttcttgtgctggaatattgaaggagccagtgtagaggaattctttaaagctccacaacccaacatgacattaacgaatcatttctataaatcacaatatctgttgccaatcagtgccagtgaactggaaaagactccgcaaatcattcaaaatccattctattaatattcaccatgaagaacaatcaacttatgattggacttgctctattagctccactctcttcctttgcggaagagaatggagctaataagaaaaagcccaatattatctatattcttgcagatgatctgggtatatcggaattaggttgttatggccagcagttaattgaaactcctaatatcgaccggttatcacaagaaggaatgacattcagtaaccattactccgggacagcagtgtcagctccatcgcgctgtgtcctctttaccggattacataccgggcacgcctatatacgggggaatgacgaaatggcttcacgtggaaatgtttggaatcataaagctgtattagctgattcgaccctggaaggccaacgccccgttccggcagaaacggtaatgattccggcagtcatgaagcaagccggctacacaacggcctgtatcggaaaatggggattggggtatcccggttctgccagtaccccaaacaaaatgggatttgactttttctacggatataattgccaaagagaagctcatacctactaccctccatttttatatagaaacgaacatcgggaatatctgaataatccattggtagtcccccacaccaaactggataaaggtgcagacccatacgaagaaaaaagctatgcgaaatatactctcaatgagtatgcaccggacctgatgtacaaagaaatactcaactttatcgaccttactaaagataaccctttcgtcttattctggacgacgccccttccccatgttcccttacaagcaccggaaaaatgggtaaagcattatgtgaacaagtttggagatgaaaaaccatacacaggcaataaagattattttccctgccgttatcctcgcgcaacctatgctgccatgatcagctactgggatgaacagatcgggggacttattaataaacttaaagaactgggaatctatgacaataccatcatcatttttaccagtgacaacgggccgactttcaatggcggaagcgattctttctttttcgatagtgctaaaccattcaaaagtgaatggggctggggcaaagcatcgctccgcgaaggaggcattcgtgttccgatgattgccagttggcctaaaaagataaaagccggtagtaaaagtgatctcatctgtgccttttgggacattatgcctactttctgtgagattgcaaaagtagaatgcccgactacggacggaatcagctttttgccggaattactaggcaaaaaacagaataaacatgatttcttatattgggaatttcccgatagcggaggccaaaaagctgtccgaatgggcaaatggaagggtattgtattgaatatttttaaaggaaacaggaaaattcaattatatgatctggattctgatcccagagaacagacagatgttgccagataccacccggaaatcgtgaaaagaatggaggatattatgaagcaggagcatatcgaaccggaactagcttcattcaaaatgcctcattagagccttaaataaatcattattcattctgcttattcggaatgaataatgatttatagtttcaatgccacctatctcagtcatcctcaatctttacggctgtaccgttagcagtcaccattagcatactgccactacctcctactgtctcgtaatccaaatcaacacctatcacggcatttgctcctaactgagcagcttgtgcctgcatttcctgcaaagcggtatctttagctttgcgcaatacttcttcgtacgctccggaacgccctcctacaatatcgcggatacttgcaaacaagtcacgaaacacattggcacctatgattgtttctccggaaacgattccataatatttcactattcgttttccctcaataatgggagttgttgttattaacattgtcttttctctttaagttatttgcaattctatatattagacgtaagccgtcctaaaaaagttgcagctataccgtaatttatttacgatatagctgccattaatgttaaagagagagaatttataatataagcatggtctcacgaccctccagatattccatgaatatttgtttctttactcattagacgcaagaaaactcaaatcactgcactttgggtattctttttttagttaaagaataaaaaaatcgctattccacagaaatagcgattcatatctttaaaacatcttgctgacacgttcaatcccggccaccaatatatcaatttccgatttcgtattgtacatggcaaacgaagcccgcactgtcccctctatgccaaggcgttgcatcaaaggttgggcacaatgatgtcctgtacggacggcaatacctaagcggtcgagtaaagttccgagatcgaaatgatgaatgtcaccgacaaggaaggatatcaccgctccacggtcagcagcttcaccgaatatacgcatagtaggaatttctttcagacgttgcagagcataagttgtcagttcatgctcatgggcggctatttgctccagaccgataccattcacataatcgagtgctttcgccagtccggtagttccgatatagtcaggtgtaccggcttcaaacttgaaaggaagttcattgaaagtcgttttttcaaaagagacatgctgaatcatctctcctcctccctggtaaggcggaaggcggtccagccattcttcctttccataaagtacaccgacacctgtcggaccatatattttatgagcggagaacacgagaaaatcggcatccaaatcctgtacgtccactttcatgtgagggatagactgagctgcatcaatcagacagggtacaccgtgggcatgtgctgttgcaatcatttccttcaccggattcaccgtacccaatacgttcgacacatgcaccacactgacaatcttcgtgcgttcggagaataatttttcgtattcgtccaacaacagttcgcctttgtcgttcatcggaatcactttgattgcaacacctttacgagcagccagaagttgccaggggacaatattactatgatgttccattacagaaaggatcacctcatccccttcttgcataaactcgtcaccaaaactggaaacaagcaagtttatgctttccgttgttccccgtgtgaacaccacttcactcgtgctgcgggcattgataaactgacgtaccgtttcacgagatgcctcgtgcagttccgtagcctgctgtgaaagataatgcactccgcgatgcacatttgcattgacggaataatactcatctaccaatgcatcaaccaccagacggggtttctgagtcgtcgcaccgttatcgaaataaaccaatggcttaccgtaaaccgtacggctcaatatcgggaaatcctcacgtatcttttgaatatccatgtttattcgctattactcatttacaaatcgcacaaccctgacatctgttcaactcaccacggaaacgtttctcaaccaacagatgcaagcgatctttcagcgcatccagacgaatggtatcaatcacttcgttgacaaacgcaaacatcagaagcagacgagcttctttctcgttgattccacgggaacgcatataaaacaatgcattctcatcaagctgtcccaccgttgctccatgcgaacatttcacatcgtccgcataaatctccaactgcggctgcgtgtacattctagcatcacgtgtagcgcaaagattacggtttgtctgttgagaatttgtatgttgggcgtcaggacgtaccagcactaatccggcaaatgcacctatcgactgatcatcgagtacatatttgaataattcattacttgtacaattcggaaccgcgtgatcaatacttgtattattatctatatgctggttcttatcagcaatcgccattccgcaaagattaatttcagcaccttctcctgccagcaatacctccgtagtattacgggtagtgccattatgcaaagtcataccattcagcaaaacgttactgtttgcttcctgctttacatacaaattactaatacggacagtacttgtatgtgtttcttccaactcatacaaatcaaacaccgtattctctcctgcaaagacttctattacctgtgttgcaaggaagttcacattatccatagcatgatcacaaatcagcagacgggcttgtgcaccatcttccagaataatcaacacacggcggttcaccatgaaattgacatctgcacgaagaatattcaccaactggataggtttttccactactacattcttcggcacatagaaaattacgccatcttgcgcaaaagtcgtattaaaggcggtcacaccatcttttgaagtatccgccagtttgccgtaatacttcttcaccaattcgggatgttgcctggccacctctttcaagctgccaaatatcacgccttccggcaaatgacttttgggaagggccttgtcatagaaagcgtcattcaccacaaaatacagggcagtgctcatattcggcacatcgcacttgaacacttcatacggattgaccggaatagccaggcgattcaggttcaaaccaaagtccggttcaaaatacttgcttacatccgtatatttgtacttctccattttgcgggtcgggaatccgactcgctcaaaatcggcaaaggcagcagcacgaggcgcattcagcacttcagcgctatgtttgcagatcatagcttccgtctgcgagaagagttctatatattgttgttccgcattcatcgtcattctcctacttctttctttatccaatcatatcctttttcttccagttcaagagcaagttccggtccggcagttttcacgatacgacctttataaagaacatgcacgatatccggtttgatataatcaagcagacgttgatagtgagtgataacaattgtgcttgtttcgggagttttcaatttgttcactccttccgcaacgatacgaagagcatcgatatccagaccggagtccgtctcgtcaagaatgcttaaacgtggttccaacatcgccatttggaaaatctcgttccgtttcttttcaccaccggagaaaccttcgtttaccgaacggttagccaatttgttatccaattcaaccaccgcacgtttctcacgcatcagtttcaggaactcgctggcagtcagcgcaggcagacctttgtatttgcgttgttcgtttacggcagcacgcataaagtttaccatactcactcccggaatctccaccggatactggaaactaaggaaaataccttcatggctacgatcttccggactcaactccaacagattctttccataaaaagtgattgaacctttcgttacctcaaaagccggattccccaccagtaccgacgacaaagtactcttaccggaaccattcggtcccataattgcatgtacttcgcccggtttcaccgtcaggttaatgcctttcaatatctctttgccattaatgctggcatgcaggtcttttatttctaacataatcacttttattttttatcctacacttccttccaaggaaatagtaagcaacttctgtgcttctaccgcaaattccattggaagtttattcaatacttctttcgcatatccgttcacaatcagtccgatagcgtcctctgtcggaataccgcgctggttgcaatagaaaatctggtcttcactgatcttgcttgtcgtagcctcatgttccactaccgctgtctcattatgaatatccatatatgggaaagtatgtgcaccgcacttatctcccaacaacaaagagtcacactggctgtaattacgagcgttatccgctttctccgctacacggaccagtccgcgatacgaattctcgctgtgaccggcagaaatacctttgctgacaattgtactacgtgtattcttaccgagatgaatcatcttcgtacccgtatccgcctgctggtagttattagtcacagccacagaataaaattctgctgtcgaattatcacctgtcaggatacaggaaggatatttccaggtaatcgccgaaccggtttccacttgtgtccaggaaagtttgctatccactcctttgcagttacctcgcttcgtcacaaaattgtatacaccgcctttaccttcggcatctcccggataccaattctgaaccgtactgtatttcacttctgcacggtcatgcacgataatctctacaatagcagcgtgcagttgattctcatcccgcatcggagccgtacatccttccagataagatacatacgaatcatcatccgccacaatcagcgtacgttcaaattgtcccgtgttacgggcattgatacggaaataagtagaaagctccataggacaacgcacccccttcggaatatacacaaaagaaccgtcggagaatacagctgagttcaatgcggcaaagaaattatcacggtaaccgactaccgaaccaaggtacttcttcaccaagtccggatgttcacgcaccgcttcgctgaacgaacagaaaataattcctttttccattaatgtttccttgaaggtagtctttactgaaaccgagtccattacggcatcaaccgccattccactcaaggccatttgttcttccaaaggaattcccaacttattgaaggtctttattagttcaggatcaacctcatccatgctcttcggcccttcctttttcttagtaggatcagcatagtaagaaatagcctgataatcaatctccggaatacggagatgtgcccatgtgggcatttccagcgtcagccagtggcggtacgctttcaatcggaactccagcaaccactccggttcgtcctttttcgatgaaatcaaacgaatcacatcctcattaagtccacgctcaatgatgtctgtatgcacctccgtggtgaagccatatttgtacttctcctgcgttagttcctttacatatttattgggttcttcttgttgcatctttattctctaatatatattgttgcgtcatactcttagcagcagggaaaaagattcccgcaaacgtttctatcggataatataacaaagattcgctcttttttgttgcactaattaacttattatcgccatccataaactctatcagacaaatcaccagacttgttaacaatagaaatttaagtgctcccagcacacaaccgagccaacggttcaaccaatccagcgaaaccgctttcattgcctttgtcagcaacgaagccaccaataagaatatcagtggaacggctatccagatgataataaaagccaatacctgtgcaacagtcatcgaatcagtcaccgttggacaaagcttttccgctaaagtggtatacaaagccttcgccgccagcaaaccgactattaatcccagtatagaagccaactgacgaataaagcctttcataaagcctactattgcgcctgcacctattataataaggataataatatcaatcgttgccatatttctctataaaaagaaaaaagaggcacggagttataattcactctgtgcctccgtttattcttaattcagtacaaattataatgtctgtttcacttctatttcttcgaatgcctcgatcatatcgcctaccttcatgtcgttgcagttcactaagctgataccacactcaaagtttgtacctacttccttcacatcgtccttgaagcgtttcagcgcattgatattcccggtaaagattacgataccgtcgcgaatcaaacgagccttgtcgcttcgtttcacctttccggttttcaccattgcaccggctaccaaacctactttcgtgatattgaacacctcgcggatttcgatagtagcagtcacctgctccttcacttccggcgccaacataccttccatagcagacttcacctcttcaattgcatcgtagatgacagagtacttacggatatcgacaccttcctgttcagccatcttagcggcagcacctgaaggacgtacctggaatcccacgataatcgcatccgaagcagcggccagagaaacatccgattcggaaattgctcccacacccttatggatgacatttacctgaatttgttccgtagacaacttgatcaacgagtcgctcaatgcttccacagaaccatccacgtcacccttaacgataatattcaattcctggaagttacccaaagcaatacgacgacccaattcatccaaagtaagaatcttctgcgtacgcaagccttgttcacgagccaactgttcacgtttgttggtgatttcacgagcttcctggtcgctttctaccacatggaaagtgtcaccggcagcaggagcaccgttcaatcccagaatcaatgccggttcagcaggacccgcttctttgatacgttgattacgttcattgaacatagccttcacacgaccatagctagttccggccaatacgatatctccgactttcagagtaccgttagataccaataccgtagctacataaccacgtcccttgtcaagtgaagactcgataatagatcccgtagcgttacggttcgggtttgccttcaagtcgagcatttcggcttccagcaataccttttccaacaaatcttccactcccatacctttcttggcagagatatcttgtgactgatacttaccaccccattcttcaacaaggtaattcatagcagccaattcttctttaatcttatccggatttgcagtcggtttatccaccttattgatagcaaacacaataggtacacccgccgccattgcatggttgatggcctcctttgtctgcggcatcacgttatcatccgccgctacaataataatcgcaatatccgttactttcgcaccacgggcacgcatagcggtaaacgcctcatgtcccggagtatcaaggaatgtaatacggcgaccgtcttccaacttcacattgtatgcaccgatatgttgtgtgatacctccggcttcaccggcaatcacattcgccttacggatatagtcaagcaatgaagtcttaccatggtcaacatgtcccattacagtaacaatcggagcacgcggctgcaaatcttccggagcatcttcttcttccacgatagcctgtgccacttccgcacttacatattcggtcttgaaaccaaattcttcggccaccagattgattgtttccgcatccagacgctggttgatagaaaccatgatgccaatactcatacaagtagcaataacctggttgacagaaacgtccatcattgtagctaattcattagctgtaacaaattcggtcagcttcaatactttgctgtctgccatttcctgatcttccagttcctgcatacggttggaagccatttcacgtttctccttacggtatttggaagtcttgttcttacctttagtggtcagacgagccaaggtttcttttacctgttttgctacatcttcttcacttacttcctgtttgataaccggctttttgaaacgatccttgttattgtttcttctattattgttgttattgttaccttggttattaccaccattattattaccgcctttgccttgcacattcggtctcggagctgcaaagttggaagttgcaacgttattcacatccaccttctctttgctgatacgattccgttttttcttgttaccggctgcatccgcgttatctttcggtccgctcttagcctgtttggcatcatctttacggatttccttgataatcgcttccttcatcagtttcttctgatcctggcggattttctctttttcttcacgttcacgacgtttctcttccttcgatttcttcttagggcgagttgactgattcaatgctgcaaggtcaatctgaccgattacattaatctttgctcccagttccggctgacggatcttgaaaacctcgtcttccttaggagcgtctttttcttccgaaacgacttctgtcgatgctactgcttccacaggcttttcttcttttttatgttcttctgccttcacaggtgcttctaccttcttcggctcttccttaatcacttcttccactaccactttttcaacttctgccggtttcggttctgctacaggttccggttgtttcaccaccataggttcggccggagttggagcaggtgccaccacctcttccttttttacttcaggctctttcttttcgggttctttcttcacttccggttcaacgacagggcgttccgctactatcggacgttccaccacaggacgttctaccacagtttcctttttctgttccggttccttttctactttatcagttttacgaccgtttaatttatccaaatcaattttaccgacaggtttaaacttcggacgtgcatcctcaggtacgactgtcttgatcacatcttccgacttcggtttttcctgttgcttttcgaagccttcaatcgaaaccgatgccttattacgatccttattctgacgttcctgaatgaaacgctccgattcaagtctaaggttcttatccgtactaaactcttttacgagtatagcgtactgctcctcgctaatttttgtattaggattagcctcaacggtataccctttcttttgcaggaactcaactaccgtcgcgattcctacattcaaatctcttgtaactttgtttaaccttatcgtcatattttaaatttaatgaataaatggagcgaagaaaatctcaatcgtaattgcctattactcttgtccttgttccggttcttcttccggttcttcttcttcaaactccgatttcaaaatgcgtattacctcgtccactgtctcttcttccaggtccgtcttttcaatcaacatctcacgaggagcattcaacacagcttttgccgtatcaataccgatagccttgattgcatcaatcacccaaccatcgatttcgtctctgaactcgtcaagatagatatcttcatcagctacattctcatccaactcacggaacacgtcgatagtgtactcagttaacatactggccagtttgatattcaaaccgcctttaccgatagccagcgatacttcttccggtttgaggaacacctctgctttcttctcctcctcgttcaaacgaatagaagaaattttcgccgggcttaaagcacgctgtataaacaatgaaatattcgatgtatagttaattacgtcgatattctcattgcgaagttcacgaacgatgccatgaatacgactcccctttacacctacacaggctcctacgggatcgattctgtcatcataagattctaccgcaatcttggcacgttcgccggggatgcgggcaatcttcttgatagttatcagaccatcatttatttcaggtacttccatctcaaacagacgttgcaagaaaacgggagaagtacgtgacaagataatcttaggattattattcttgttgtctacgcgggcaaccactgcgcgtgccgtttcacctttacgataaaaatcgctcgggatttgttcggtcttgggcagcagcagttcgtttccttcatcgtcgagaagcaacatttcctttttccagatctgatacacttctgcattgataattgtacctaccttatctatatatttattataaatactgtctttttccagttccagaatcttggaagccaatgtctggcggaggttcaggatagcacgacgaccgaatttcgcaaaaataacttcatcagtcacctcttcgccttcttcgtatgaagcgtcaattttctgcgcctcactcaacgcaatctgcatattcgggttagtcaaatcttcatcggccacaacttcacggttacgccatatctcgaaatcccccttatccggattcacgatcacgtcgtaattttcatcggtgccaaacattttcgcgattacgctacggaacgactcctcgagtacactaaccattgtcgttctatcgatattcttcagttccttaaattccgaaaatgtatcaatcaagctgattgtttcttcttttttggccataactatttaaagctaattaagtatttagtatattttatttgctcataagtaaaggtttcgtcttcttccaccagctttggtcgcttggatccttcgagtttcaccttcttttgtacggttaccgtaaacttctcttcatcggcatcctttaggataccagtcagtttctgtccgcctttggtcatcacttccacttcttgtccgatgtggatgtaatactgctgcagcactttaaagggctgtcctataccggccgaccctacttccagttcataatcttcctcttcacggttcagtttcgattcaatgtagcggctaagctccacgcaatcttcaatccaaacgccttctgcatggtcaatttcgaccacaattttgtcatccgggctcacagttacctctaccaaaaagtaatcttttccttccagccactcttcaacaatctgacaaacagttttcttttctatcatttattagctattaagaacaaaaaaaggagcttaattgcccctccacctttcatccgttttcggttgcaaagatataaataatctattcgactacaaaacattaaagaaaaaaagtatgaattaacagtgcgatattcgtatctttacgccgcaattaaaaaaaataacaactatggcgcatcgtctcaacaccaacaaacagttcatggtcggcaatggaatcctcgcttttgccgtcatttttgtcgtagtgattttcatctatatgagtatgcgactgcaacagaagcaacaggaagaacgacattttatcgaaacatatacgattagtctggtcaaaggctttaccggcgattcaatttctttgtttgtcaacgacagtctcatttccaataagactatcatagaagaaccttatacagtggaagtcggtcgttttgccgagcagagtgcattgttaattgtagataacaaaactgaattagtatcgactttcgacctaagcgaaagagggggtaattatcagtttgagaaagaggaagacggaattaagcaactggcgaaataaacggtaaagcaagataaagacaaaggaactctttatatttctgtccgatatttcttcagttctccccgtagagcaagagcttttccttccgtgaattgattcagtagagaccaaaaacgttcactatgattcatctcacgggtatgacatagttcatgcaaaagcacataatcaatcaaataagaaggcaacaaaacaaggtaataggataaattaatatccttctttgtcgaacaactcccccaccgcccctgactggaatttatcttcacgcttgcatagggcaatccgcattgtttggaaagacggtctaaacgtggaggaagaatactttttgcattccgcctcaacgattcttcaatcacctttcgtagccaactctgcaatttctcatcagtaaagtccgcatttggcggacaaataatctgcatacatcccaatcgggaatttgccagaaactgctctttctctccggacaccaaagacaacttgaaatattctgcatcaatcttataattcaaatcaattaacggacgattcaatcgttgacgagaagccagcaacttactacgtaaatcttcaatcgcccgttttacctctttcatcgttgtgccggaagggactgaaacgtataccgcatcactctttgtacgaaagacaagacttttagcacgcaaattaacacgcactattaaccgtccaagttcttcatcttctataattgcctccttcatcataagtctcctaataacaggtacaaaagtaataaaaaaaagattcttccactcttagaaacataaaagggctactgcatctcgcggtagcccatttatttagttagtttcattataaaaatttgagagaattgaaaacttcacagtttcgctttcgatgttgttttaattaagcacactaactatattatatgtttaaagcaaatgaaaatgtctattcattaataacctgcatcttgtggttgatcttcgccagactatcagccaagacctgatccgctttcacatcgttcgagatagcgaccgacggtgcagttacttgtttaccaatggtatctgtggccaatacacttccctcatctcccgagaaagaatgttgtgccacatttcccaatccgagaatgattgcaatcacggcagcggctttgaacagaggaataaagcgactcgtcagtgtcagacgttttgctttcactaccgggacctccacttctgccagaatacgtgcatcaaagtcctcacccagccctacttcttgctgaacctgctgataaacaaacaagttcttatagcgaagcaaatgagccggtacgtcttctttcgagaagaagtcacgcaatcttgattcctcctcaacggaagtttcacattgccagtatcgctccaggagctgttctatatccttataatccatattcgtcaatttctaaatacctttgttttaccttttgcctggctctgaagagattcactttgacttgttcctctgtcagattcagcagggttgcaatttttttatagctttcaccttcaatgtccctcagttgcatgataagccgctgtttttcgggaagttcgttgaccaacctattgatgatgttcattttttcatcatgaatcatccgatcgtacggactgtttgcatcaggttcttcctccatttcgggggtgagttccacgttttgagcctctttcttctgactccggtctatcgcaaggttctttgccactatcaggcaataggcttcaaccgattcaaattgcgaccactcatcacgcttgctccacactcttatcatggtgtcctgaacgacatcctcggcttctgccctatccagggtgattctgagcgccaatcgaaagagtttgtccttcaacggcaaaatatcgtttcggaagctgatttcttgcatctctataataatgacgggctaggattcgaaaagttacagtcgcccactacttttttttgaattatttttttatccgggttcctccgttgccgttaatcgctgatgctaaggtaattatcacttcagacaccccagcatttattgcttcaaaagaattctccagtttcggaatcatacctccttgaataacgccatcggctacgtattgttcaaattctgcacgggtaatctgaggaattacactatcgtcatcattctcatcacgcagtacaccttttttctcgaaacagtacaccaatgtcacatcaaacaggcccgacaaagcttttgccgtctctccagcaatagtatccgcattcgtattcagcatattcccttgtccgtcgtgtgtcaacggagccataaccggcaccacacctttgtatatcaagtcagacaacagagaagcatccaccttctccacatcgccgacgaaaccgtaatcaacttctttcaccggacgtttcaccgaacgtatcacgttcatatccgctccggtcaatcccagcgcgttgacaccatacgcctgcaacccggcaacaatattcttattcaccaaaccgccatacaccattgtcactaccctcaacgtttccgcatcagtaatccggcggccattgaccattttgctttcaattcccagttgtgcggctatctttgtagccgaacggcctccgccgtgcaccagcaccttatgtccttcaatagcggcaaagtcgtttaacaactgacgaagggtggcttcctcttctacgattttgccacccaccttaattacagttagtttttctctcatttttattctaaatacgtatatccataaagtcccgaacggtagttggaaaggaattcttttccttcttccaaagagattttgccttcctttactgatttcgtcacccaagtttcgagcgtacgaaccaacttcttcggattatactgcacgtagtccaatacttccgccaccgtttctccgtcaataatctgttcgatattatatcctttctcgttcacagagacatgcactgcattcgtatcaccgaacaagttgtgcatatcccccaaaatctcctgataagcacctaccaggaaaacagctacataataaggttctgttttcttcaggctatgtacaggcagataatgagctacattacgggtagagataaagttcgcaatcttaccgtcggagtcacaggtaatatcctgcaaagtagccgagcggtccggtttttcatccagccgttgaataggcataatcgggaatatctggtctatcgcccaggaatccggcaacgattggaacagtgagaagttacagaaatatttatccgcaagcagcttggacaatcctcggaattcgtcaggcgcatgtttcaggccttcggcaatctgattaatctcacgtgtgatcgaccagtacaggcgttcaatctgtgcacgggttttcaagtcgacaattccgtgactgaacaaatccaacgcttcctcacgaatctgttgcgcatcatgccatgcctccaacattttattctgattcaacgaatcccaaatgccatataattcctgcaccagttcatgtgcgtccggagcgattacttcttcatcatcccattcgggtaaagtggcagtctccaacacttcaaagataagcacagagtggtgtgcagtcaatgcgcgtccgctttcggtaataatattcgggtgggggataccattcttatcgctgacatccaccaatgtagaaatcgagtcattcacatattcctgaatagaatagttcacgctgccttcgctgttggacgaccgggttccgtcgtaatcaactcccagtccgccgccgatatccacaaattccactttgaaccccatagcatgaagttggacataaaactgtgaagcctcacgcaaggcggtcttgatgcgacggatcttcgtcacctgactgccgatatggaagtgaatcagtttcaggcaatctttcaatcccttgctttccatgaaatcgagtgcttcgagcaactcactggaagtcagcccgaatttgctggcatcgccacccgattcttcccattttccgctaccggaagaagccagtttaatacgaataccaatattaggttgcacattcaactgcttcgccatttttgcaatcagtttcagctcattcatcttctccacaacaaggaagatacgtttacccattttctgggcaagcaaagccagttcaatgtaactctcgtctttatagccgttacatacaatcaatgagtcagaatccgtattaacagcaatcacagcatgcagttcaggtttagaacccgcctccagtccgagattgaatttctttccgtggctgataatctcctccaccacagggcgcatctggttgaccttaatcggatagataataaagttctccgccttataaccgtattcttcggctgcctgtttaaagcaggacgacatcttttcaatacgattatccagaatatccggaaaacgcaccaacgtgggagccgctacatctctcagttgtaactcgtcgaccaactctttcaaatcaacagctaccccatctctacgcggtgtaacaacaacatgacctttgtcattaataccaaagtacgaggttccccaacctgtaatgttgtagagttcctcagaatcttcaatacgccactttctcatttttctgtaattcagtgtttttagtaaataattggacggcaaaaatacagatttatctacatgttgccaattaattagacattatttctttcagtcggtccatatatccgctgtttccgttacgggcgtcatagcgctgtgccagttcttcagcctgctgatagaaataccggcgtaattcgctgacagagtaaaccccgtccgcgcggtaaagagggaactcctccggcaaagccagatgaacctccggacgcatctcatacttcaaggcctccaccatatcacaggagaaacgatatttcttcaacgtattggtacgcaggctccagtcaatgcaccgttcggcatactcccagccgcgctccggattcgtcatcaaataataagcgataaacagccccatatagagcaacagatactcgtccttctctcttccggccaacgcttcttcggcacgtgtacacatatcggcggcaatatccggcttacccgctttttgtgcataataagcaagcttcaggtaagcacgcaggttagcttcatagcaagtcacctgtttgttaatcaatggctgcgcccggctataagcctcatcaaattttcccgtttccagataataatccaacataaagttcagttcacaagcctcacacgactggtcgtccattttctccgccagcatcttatcaatatattcctttgccttgtcatactgcctcatccatgtgcattccaccgaccagcgctgataataactccgcaaagaatatccgttccgcaagatacgggtcttataatcctcccctaccgcttccacctgttccattggaatctccggaatatcaaaagtcgaagaccatatccatttatacttccacagcagatcatcctccttgattacatccttatgattctcataatcatccagaatcttagagaacacggcaatctcctcagtgtccgccgagagaaggttcagttcataaatgaggtccagcctcatttccgttgcccattccacatcttcgttttcatcagcgatgcggatagcctctttcaacaaattagctttctcacggggatgcaggtttttattctgtgcctgcaacagcagtttttgtatttcaagtgtgtatttcatacgctttcttaattcaggaaacttataaaatcattcattttagcagtcatcaattcactgagcgagtggttgaaaagttccatttcctcactgttcacaggatacttaccctgaaggagtgactgtacatataatatatgtaccacatgctgaaacattttattatctccctgtatttgcagtaaagtgcggaccatttcattatccacattaaatgtcagcgtcggaggtatctgcctggttgtattgacagtccccaacacagccgctaacggattattggtactcttggtcgtactctctttctcctctgccacaaatatcaccggaatatccgccggagtaaagtgcttcaaccggcagacgcagccaaaacgctttaacaactcgttcgccttcgcctcaaaagcccggaactcttttttggcttctacctccccaaactgttccagtaatctcgaaggggatatttcatccaaagtcagttccggattcaggcgggcatactttttcaacaacgtttcatcaaacgtataagcggcattaaccaccaaccatccttgtgctccggcaatacggcgtacctgcctgaaatcctccagattcctggtataacagatcacattgtccgccgaacggatactcccgaagctccgtacccccttattcgtctcaaaaggaagataatccataaacaaacgaagcaactcattatcttccgaagcaatcgccttgatgtgaaaatgatgcacgtccagtatcttattaaacatagcccggttgttctgcaccagtccccgcaaataatccttgatagccatacctatctccttgcgggcatccttcagcaaatcattgcttaccagagactcgcgtgaagcagtagacaacaacccgtccgcattcaccagacaacggataaagaaagcccactgcggcaacaggttacaatcatcctcactcaacagcatacgcttcaaatacactttgtgagagttacgcacagaaaactgcgtccggaaaggcaacacataaagcactccctccacccggccgctttcagtccgtatccgaaaaacatcaagcgcagatgattgaaaaactttcgccccgtaatcaaggagttccttgcgggttgccttcgggtcaagccatacaggcgaaggcgtattcaccacctcttcctcatcctgatgatgcagatagataggatatggcaacacctctccatagccgaccaatatcttcttaaatgtatcatattcaaaaagatgcatccagtcattcttgggatgcaataccacctgcgaaccgataggacgttcttcggcggatgacgtcagttcatacgtaccgtccaccttaccacaccaacagacagcctgcccacccattgccgaccggctctccaccttgatctcatccgtcactacaaaacaagacagcaaaccaataccaaaccttccgataaagtcatccgcatcgggcgtatcccgtttcgagctttccccgataacggtaaggaaacgatatacctcctcctctttcagcccgattccattgtcgcggaatatcaccgttttgtcatcattcagaaagacatcaatacgtcctgcataattctcgtcaatattgcgcaaagctgtaatagcatccacacagttctgcaacaactcacggacaaaggtattcggattactataaatatgctctgacaacaaggcaatcattcctttgagattgacttgaaacagattattcccttctttctccatgcctacttactattttctcctccttccggtgatcttaagggccttttcgttaccattttcagcagccttctcgaaccactccattgctatatcatcgttttcttccacaccatttcccgtcaggtaagcgtttcctagttcaaattgagccttatcattattcttttcggcagctttcaacagccattgcacagccgcttccgggtcaggcgtacagccttcgccatacatttgcatcttacccagataatatgcggcaccgatattctcattaccggctgcatccgtaaaccaacggtaagcctccgcataattctgcttcacacccactccgttgtaatagcaaagcccggtacgatacatactcgtcacattaccgttatccgcagccagtgtataatatttaaaggcttccgtctcattatcctctacaccgatacccatttcgtaacagatacccagtccttcgttataccattcgtattcggcagccttcttaaagtaagcaaacgccttttccgactcgttcagactatcataatcatacaaataataatcccccatgcgcagcatcgccataggaatctcattcgcaacagccttttcgtaccattccacggctttcttgttatcttccaaacaaggaccgcacccgaagaaataataatctcccattttaaactgggcgtaaccataatcctgttccgctgcccgtgtcatatattccacagccttttgcgggttttcctccacaccgttaccgttctcataagccagccccaattcagtcagacagcgggattcgttcttctctgccccctttccgaaccactcgagtgccttgtcccagtcctcctccgtaccgattccctgtttgtaacaacgtcccagagcaaagattccttcattttcatccgccatggcagcttttgtataccaggcaaatgcctcctccggcttcgcctcacccaatacagctttttccagataaagacctatgcggaacattgcataaggatagccttcctgtgccgctttttcacagagttcaaaagccttctcatagcttctttccactccgttgccattctcgtataagaatgacagttctaccaatgcaaaacatgaacccattccggccgctttctcgtaatattctctcgacttcaccgcatccgtcacaccgctatatccgttagccaagtaaagcgctgcacggcagtatccgtccacattatccagttcagctgctttctcgtaatattccatagctttcacataatccggttcttcagacagaaagccacgttcatacatccaacccaaacgataggccgcatttcccgaacccagttcgagcgccttttccagcaactgttttgcacgactcatgtcttcttccaccagatcaccgttgaaatatacattcgccagtccttcgataccttctatataatcaccttccacacaacgttcgagacacatcagcccacgttccacattcttataatcatcattgtacaagtaaatcaatgccaactcatacgcactatacaactcgcaataaagcattcccttctccagccattctattgctttaggcagatcaagccattcctcctcctgataattgtatcccaggaagttggcggcagaccatactccggcatgccaggctttctcccaaatttcgaaagccagttctttcggtttacccagttcgggataacggaaataaagagtagcgagatttttcagactatatagattgggaacgatttccaaagacttttcataacaggcagcttcctcggctatcttgccttctcccctgtcgagtgcgtctcccattgccgcatacacatgagcacgcaaacggtcgccttcgggcagttcggcaagcaaatcctgccgtatctgcaacgctttctccttgttgcccgtaaactcttcggcaaaagcgcgataatgtttcccccaaagaatagcttcgggtgaagaaagagccgcaaaacgtcgttctccttcttccttatcctgctcacaataaaaccccatataccgccaataggcaacagtcgcttccgcttcaccccagcccatatcggcagccttctcgtagcaagggaacaaatagctcatatcccgctttccatagcgggcctcggagtactgtgcacctttctgcgcccagcctgctccgctgaacacagccacacgttcgcacacctgcatcaccttctcccaccagaactcatattcttcttcgctgagatcgacttcgacattacagtcgaatgcactgaatatcaattcaaagaaaccttccgtcagtttctcatcctcccgggtgtccaacgcatattcgcatacagccaatgcttcccaccagttatcagcatttaataatgaagtagatgtatatttcggaaaccatgccgcagcaggtttcccagaggctttaatcccggcggacaactcctcgaatttctctttcaaagttcccataacagtctctttatcttctttcttgtgttaatagtcaatagaaaaatctcgtaacgagcgccaaggtacaaatattgactgaatgaacaaaaaagagaacccaaaaagataaagagcagataaaaagaaaagggagaaaccatgtggttgacatgacttgtgaaagtaaaatagcttatagtcccaacaattcctgcaatcgttgcacggctgtttcgatctgccagcgatcttccagttcgtcggcattgaaaatatattgcgcctgcgtgtagaaaggagcccgttgttccagtgctcggatgataaacgctttcaattcatcatcctcttttccctgaagtatgggacgctgttgcttggcgatacgcaaccgtctgaacaacacatcgggatgaacatccagaaataccgtcttccccacccggttcataaattccatattatcaaaaaaacaaggcgctcccccccccgtagagattaccacattctcgaactcggccacctcatggagcatattcctctccaattcccggaatccggtttcaccacgttcggtaaacagctctccaacagttttgtgaaaacgctcctcaatataccaatcgagatcaacgaacggtacattcatcttacgggcaaatgccttacccaatgtcgtttttccggcacccatatagccggtaaggaagatacgaaccataaatgactaattttgctcacaaaattagtcattttattaaaatccaagtattaaaaacgaagttatttgaataccctcacccgttcttcgagcggttgaaactctttttcacccggtttagtcacaggaagtccgaacggcatttccgcaatcagatgccaatgtccgggcagattccatgcacgacgcacctcgtcgtcaatcaacggattatagtgttgcagtgacgctccgaaaccgacatcttccagcatgacccatatagccagctgatgcatggccgaagtttgcagcgaccagccggggaagttatcctgataggatgggaaagcctcctgaagtcctttcactaccttttggtcttcaaagaaaagcacagtcccatatccgcaagcgaacgagttatctattttttcttccgtctttacgaaagcctccgcgggcacaattttcttcaacgcatctttcacaatctgccacagtttcttgtgtgattcccctaacaaaagtaccacccgcgtagactgcgaattaaatgcagacggcacgtggcgtacggtcatattgacgatacactcaatctcctgatccgggataggcgactgattagtaattgaatagtaagtccggcgatgtttcaaagcttcactaaaagatctttccataatagctcctttctaaatgttatattcttaaactctcttatttttataacaagtagctctgttgacttgttcagttagagaatatatttgtaccttcgcgctgtcaatatacagacatcaattcattgtaaaaaggaaaaatggctaaacagaaattctacgttgtatgggaaggcgtgacgcccggggtttacacatcctggacggactgccagcttcaaatcaaaggatacgaaggcgccaaatacaaatcattcgacacccgcgaagaagcggaacgcgcactggccacctccccttacgcctatatcggaaaaaacgccaagaagaaaagcgagaaagtttcttcggaaacattgcccgcctgcgtgattgacaacagtctggcggtggacgctgcctgcagcggcaaccccggtcctatggaatatcgcggagtccacatagccagccgccaggaagtcttccatttcggcccgacgaaaggaacgaataatatcggcgaattcctcgctatcgtacacggactggctttgctgaaacagaagggattcgatatgcccatttacagtgacagcgtcaatgcaatcagctgggtgcggcaaaagaaatgtaagaccaagcttccgcgtaccgcagaaacagaggaactgttcaaactgatagaacgtgcggagaaatggcttcgggaaaacacatacaccacccgtattctgaaatgggaaaccaaagaatggggagagattccggcagattttggcagaaaataagacaaaaagaccaaacaccccaaaatatatttttatctttgaacccaagatagcatttttgtatccaaacacatcaataaatgtatgaaaaataagcaatttattattttagcggtcgtttgcgtcgttactcttctcccttttatgggattaacggatttccataccaaaggggaaccccgcgaagcaatcgttgcatactccatgattgaaaccggtaactggacgcttcccgtcaacaacggcggggacatcgcctacaagccgcccttgtttcactggtgtattgccgccctttcctctattgccgggaaagtaacggaatacacttcacgtatgccctctgcattggcactgatagctatggtgttaggcggattcttattctacgccaaacgcaggggagcttcagtcgccctccttatgggcttaattaccctgtctaattttgaagtccaccgtgccggtatgaactgccgcgttgacatgatgctgaccgcctttatcgtactcgcgctctaccaactctaccgatggtgtgagaaagggcaaaaaggattcccctggatagccaccttgtttatgggatgtgccacactaaccaaaggtcccgtaggtatcctcctgccttgcatggtcaccggggtctttctgctgatccggggtaccagtttcttcaaagcctttttctcgatggcactggtagccattacgtcctgtatcctgcccgccctttggtacatcgctgcctaccaacagggaggagataatttcatctcactggttatggaggagaatttcggtcgtttcatgggaaaaatgagctacgaatcccatgagaatcctgcttactacaatatcattacagtcgtatccggctatgccccttacacattgttggttctgctttccttattcagccttacatacgggaaaataaccggaaaaccccgcgaatggtggcagaggttcacaacatatatccgcgaaatggacagcacccgcttgttctctttattgagcattgttctcattttcgttttttactgcatcccaaagagcaagcgcagtgtttacctgttacccatttatccgttcatcgcctatttccttgccgaatatatcatgtatctggtccggaaaaactcaaaagcagttaagatatacggcggatttctctccgtcgccgctattcttctccttgtcacgtttatagccgtgcggttaggattagtgcccgacagtattttccacggaagacacgccgccgagaatatagccttcatgaacgcgttggcaaatatctcactcaacgcaggccacatcatcgtcatctgcctgccattaattgcagccatctatttcttccggacaatcaggaaaaaagaaccgggaatgaacgtagtgtatgccactcttttcgttacattctcgcttttcatgtcattggacggtgcttaccagcccgccatactgaacaccaaatcggacaaaggaatggcggaagatatccgggaaatagcttcgggcagcaagatctattcttatgtagctgtcgatatgctccgtttctacacggtcaatttctatcacaacgaccagataggattgtttgaaaaggatatgccggccgaaggctatctattggtaggacgacgcgattttgaaggtttcaagcccaaatatgaatccgaatatacttttgaagaagtatatcagagcacgaaaagaggatgtgacatccgtgacattatttacctgtatcgtttcaagagaaaatagccataggatcagcatagaataacagaaaaagaagtaaacccgttacaggtttacttctttttctatcagataacgcggacggcgtttcacctccttatatattttaccgatatattcaccgatcactccgacggcagtcaggatagcgccgccgataaaccagacagaaatgagtagcgaagtccagcctcggattacgtctccgccaataaactccaccaaagcatagataatggccaggaaagaaaccagcataaagataagcccggatgtggtaatcaggcgtaatggtttgacagagaaagaagtgattccgtccagggcgaagttcaacatcttcgtgaacggatatttcgattcaccggcaaaacgttctttgcggtcgtaatagacagaagcggtaggatatccgagcatacacaccatgccccggaggaaaagattacgttcggggaaagacaccaatgccttcagggagcgcttgctcatcagacggaaatccgcatgattgtaaacaatctccccgcccattgtccgcatcagtttgtagaacatctgcgcggtatgtttcttgaagaacgtgtccgttttacgttcccgccgtacaccgaacaccacatcggccccctgattataataatccaccatttccacaatagcattcacatcatcctgcaaatcagcgtcgatagatacagccgcatcataatcgccggccgccacaaaatccaatcccgcccagagagcctgctgatgcccgacattatgcgccagtttcaagcctgccacacacctatgagattcagacaattgctctatcagtttccaggtagtatccttgcttccgtcgtccacatacaaaatctttccttcggccaccttcccttcctgctccattcgggcaagcacatcagatagctgacgagtcgtttctttcaatacttcttcctcattataacaaggaactacaatcacaagtctcacgccgttcatagctttttatgtttaaagacaaaccgaacaaataagaaattcacaggaatcgctatcgcaaacaccggcacaggtgcccatgctttagaaactcccagatagaggaatacattcaacagaatgatatgcaacaaataattaaccagatgcgcccctcccataccaaccaactttttccatgacggagtggttccgaacgtaaaataagaagtcagatagaagttgacaataaaactgattacatatcccgtcgtataggctacattgacgttgataaaagattgcaggaaataataaatcccataatgcaatgccgtagccagcacgccgaccacgccaaaacgtataaactctttcaccaacggctttgttttcataaagcacttacttcttgacggatactttatctaatgtcttgtgttcttttaccagggattccgtactttgcagcatagagaagcaataatccttcaagttccggaaagcctcctcatcagtaccagtggcagcgtggagcttaccttcctccagtttgtacttgaattcctgttggctgtccggcgaatagataaacatattcaccgagtctcttgccccgatcagattatccgccgtaaagaacatacaaggacgttcttcttccaacagattgacaccgaaattgttttgcaggtaacttatgttaagcagccccaacaacgtaggagatacatccacctgcccaccaaaaccgtcgtatacccccggcttgatatctttcccgtaaatcatcagagggatatggttataagactggggcatttcacattcaggtgttcccaccattttgccatgatcgcccagaaaaacgaaaatcgtattgtcaaaccacggctgtttttccgcagcctgcataaactgccggatagaccagtcggcatattctacaatctgttcttcgagcacatcactatgcgggtgaaaatagggcggaatcacataagggggatgattgctgatagacagcaatacgctgaagaacggattccccgtcccggccctttcattcaaaataggaagtgcatactgatacatgaagtcatcctgcacaccgaagctgttcactactttttccgaaggataattctcctgagcgtagatttcgtcgaagccgttcgtgcgaaggaaagcattcatattgtcgtactgcgattcgtgagtcataaagaacaggttacagtatccgttctcctgcaatacggtaggcagtcccgaatagacaggaatcacagaacctttcatggcattccgtttcatgatagccggaaaagaataaagcgtggaataaataccatgattggtatgaataccggaggagtagaaatgactgaaactcaaggattgctgataaaggctatccagatagggagtcagtttcttatccgatccaaaagtccccattagattggcggacatagactccataaagaccagaactacgttcctgcgattaggcgtaccttcccgttctactttccgtgcgatcggagacaaccagtcaattccttgcctatgcaaatatttctgtacttttgataaagcgtcttcctcagacatcagatgcagagtccggttttctttccggttatcatccagtgtacttgtcagcagattaaagacgggattcactcccaactgattcaggaacgggtcttcacaataatatgcctgacttacttttatcgggttatatcccatacgcccacgaatgccgaacaggcaaagcccgatacaaattgcacctgctaccaacacagctacccggctcaacagacttatctgtggtgcagccttttctgccctacgatagaaataggatgcaagggaagaagctccccaaacaaataccacgatagacaggagcccgaggaatatcggaaaatagtaagaagactccccaaacatcagaccagctgttgtaccgccatagccgaaccaattataaatagaagaattaatcgttttgaagaaatattcaaaatatggaatattggcagcagcgataacaaaagataccgaataaaaacaactaaaataaaccgttgtagacctaaacagccatttagcggtgtagttacaaagagcggctatccacaaaacaaccagagggagcaacaggatataacaagctattacattgtcaaaccagagtccgcggaggaaagcaccggactgcaaaagaacatctccctttatttctgccgggaattgatagtcaatggaacagaacagtgtgaaccggaaaataaagaaaatgaagagagctgccacgtgtatggataacagatataagagatagcactcaaaacgttttatagagattcctttcattagattcaacttaaaaaagttccattataattattccgttacagttgctgcatatcgtgtaagcgtttgtaatatccgttcagttcaatgagttcctcatgcttgccgcgttctacaatctctccctcatagagcacgcagatttcatccgcattcttaatagtagaaagacggtgagcaatggcaatcgttgtacgcgtcttcatcaaacgctccaacgcttcctgtaccagacgttccgattcggtatccagtgccgaagtagcctcatccagaatcagaatcggcgggttcttcaagatagcacgggcaatactgatacgctgacgctgaccaccggacaacttaccgccccggtcaccgatattcatattatatccctccggcttctccatgataaaatcgtgtgcattcgcaatcttggcagcttctatcacttgctccattgttgcattttccacaccaaaagcgatgttgttgaagaatgtgtcattaaacaagattgcttcctgattcacgttaccgatcaaactgcgcaaatcggcaatacgaacatcacgtatactggttccgtcgattgtgatatctccttcctgcacatcgtgatagcgcggcagcaaatccaccaacgtcgatttacccgaccccgactgtcctaccagtgcgatcgtctgacctttaggaactgtcaggttcacatgcttcaacacttcccgtttaccgtcataactgaaagtgatatccttaaactcaattttgtcattcagtcccttcaacggtttcggattcgaaatttctttgatcttattctcagctttcagaatcttgtctacacgctccattgaagccagacctttcgggatgttgtatcctgccttcgcaaaatctttcaacggattgattacgctatacaagatcaccatataaaagataaatgtcggagcgtcaatcgatgcgttttgtcccagaatcaatgtaccgccgaaccataacacagctacaatcagaatcgttcctaagaattcactcataggatgcgccatagcctgacgtatggcaaccttatttgtcgcgtcacgaagttcgttgctgcatttggtgaaacggttaatcattttgtcttccgcaataaaagctttgataatgcgcaagccacccaacgtttcttccagttgcgacatcgtatcgctccacttgctctgcgcctccaaagactggcgtttcagttttcgtcctaccacacccatcagccagcccattcccggcaacacaacgatcgtaaagagagtcaactgccagctggtgatgaccagtgtcgcaaaatacagaataatcataatcggactcttcatcaacatatccaacgagctggtaatggagttttccacttcacccacgtccccgctcatacgagcgataatatctccttttctctcttccgagaagaatgacatcggcagacgcatcaccttggcatacaccataatacggatatcacgcaccactcctgtacgcaacggaatcattacagccgaagaagcgaaataacaaccggttttaaacaatgtcataatcatcaggaacagtcccaaaaagataagcgccatagtaggtccattatctattatcatctgactgatataataatagaagttattcttagcaacatcggccaaatcaccacttccccattccataaaatgatagaccttatcagccccttccgtcttgaacaggatactcagaataggaatcaaaaaagtgaatgaaaacacattgaatacagcagataaaatattcagcaaaacagcccagccgatatacttcttataaggcgacacaaaacgtcgcatcaattgtagaaattccttcattacttgccattaaataagttaagaccgcaaagatacaataaaaccgattaacagacagcagtttcaccgaattattaacgcgatttatcgaaaagagcttgtaagaaagcgatcatatatccgacaaactctcatttcccgagtcataaagtcttccttccggtaagtctttcgcaattaccctgtatctctttttgagcgacagccaccacatgataataaactccgcgcgttttcctgtacgatttcactcccaaccgttgcagaatacgtccgaaatagttcacctgaccggaagagaatttcattttactcgccttttgtatccgttgcaatatatcggcagcaagtatccactctccttcttcctcatcgtccgcaacgcggtaatatacaagaaacagctgttcgataagcggtgactgttcaaactcctgattggcttccgtcataatggcttcttccttttcgtcaaaccaataccgttcattgtgatagagcgccgccattgcctgcgcataaagctgttcataatcaacaggacgaaccacatcaatcactcccgtaacctccacacctatataacgacgactgccggaagtatctgtcagcaaatccttatgattgcttgttccgatgaaagaagcgtaacggcgaagttcttctaccgccgaagcattcgggcgccgtgtattaacgaccggcttttgcatgatatgtttaaggaaaggctgctgattgatacctatctggtcaaactcatccatattaatcagcaaaaaacgattcagatacaactccgcatcccgtttccggctaaagtcaatgctatccgtatagtacgcctgcaaacacggcggtagaatcaggcggcaaaacgtagatttcctgtaagcctgcggaccgactaatataggcgaagtgctgtttgcatgatttttacccagtccacgccaatgagctatcatgctgagaaaccaacgacggaacaactgtgcccaatggggattattgcaaggaacccgctttgccagatctccgatgtgatctttgccgtcccaacgggggagatcataaaggaactcttcaataggctgataaaccggcacatgatctgaattcagataacgcaccacgtctttgtcccacaatttaagcccttcgtattgcgcattcatggtaatacttgccatcagcctcttatttaccggacgaaaataaaaatcaaaactgttccgttgccggcattccacttgcgaggtcaacagattgaaacgaaactcataacgacgtttcataaactcatccatttgcatcacaaacagttgttccggcagcagactgcttttatccgcaaatcctttgcaagtgcgatatacattctgcactgtctcacggatcagaaattcatcatccggcaagcggtaatgggcacgagtccaccgcactgtatcctctgcgggaataccggcacgaaaacaatgtccggccagacaaaccagcaaggaatgtatatcatctcccggctgatagccatgctgctcatccaaagcccgcgcaaaagccgcctcaaaaagtacggaaagagctttataactctcatatcctggtacaagccgttgcaaaggcgaggtttccgccttcacctgttcgcgataggtcgtttctcccggcatagccataggctgtttcatatagacaggcatcgcttcgggattaaaatacagttcggggtcgaaggtcagacgacaatattgctccagtaaaggttctttcaagtcgatatcgaaaggaagctgcggttgataaaatttcacggcgagccggtaagcgtgcgcatggaaaagttccgcttgctcacggttgcccggcaaaagatcgtcaggataagtaaagcgcacccatatctttaccgactttccggaagaaccggtaaaagcaagataggtctgcggaaactccttcacacgttctttcacctcagccgcttccataggtccggagagattgttcacttgaagcatcaccactccgttgtactcgtccattgtcattaccccgttcttacggacaaaggcagccgcaggaagcaacttcggcactttctgtacatagtcatttttatctcccggaaatatataaggcaggacttctctcattcctgagacgagttgtgctttagtttccactttcatttgctccacgagctgttcgattttcaacgtccgcaaagtgttcactctgccgtcgtctctaatttgtgttattctcattacttatttagtttgtcctgcatgtttgtgtagggcgattattaccggagacaaaagtactgtaaatattccatacaaacaaattttaaaagtgctggttcttctttctaccagaaaagatttttcaatttcatttctcatattctcatacttttcagttaaagtgtagtcaatcaaatagatgtactatgagaaatactttttcaaacaggcatttctcatagtttattccacatttcggctcaaaattcgggtatttctcattgtttttcagagtatttctcatagtcagcacaactctgcttgcctaatgccggataccttatccaatatgaaattaaactattatttaggtataaacaactaagcatttacttgttttccgcccaatattgttgtatctttgaaggaacattccaaccgttccactccagtgcacaggcctgtctactccagtaaaaagttctgtctactgaagtgcaaagaaccgtctaccggagtggaacgatagaagcatcggtaggaaaagaaaggaatgaaggcaagatatagcaacagcctaagtaacataatacataaatcaccattaaattgaaacagcaatggcaatacaattcgagttttataagaatccccaaccggaaaaagaaggggaagaaccaagctaccaccctcgcgtagttaattttcaacatgtcactactcagcgactagcaaaagaaatccacatggcaactactttcggaaaagcagaagtagaggcaatgttaatggaactgagcagatgcatgggcaatcatctgcgcgaaggagaaagagtgcatctggacgggatcgggtattttcaaatcacattgcaagccgccgaacccatacactcacttactacccgtgccgacaaagtgaaactaaaatccatcaacttccaggccgacagagacttgaaaagtttgtgtatgaccacacacctgcggcgttcgaaatataaaccgcattccgcctctctttcagaagaagaaattgaccggaaactcacggaatattttgcaacgcatcctgtcttgactcgtactaatatgcagtctctttgcagcttcactcaaagtatggccagccggcaaatacgcaggctaaaggcagaaggtaagctgcaaaatatcgggaagcctacgcaacctatctatgttgcagggacgggatactatgagaaatgagcaaaatcagggtcgttttgcaaaaaaactatgagaaatacaagttcctaaaagtatttctcatagtctactttactaattatctgcgatttatagcgagcttatgagaatatgagaaatgaaaatcaaaaatacgcgtcagaggatcgagctaatatagaaaaccaacaacccaaataggcaacttacacctgtaaggtgtttctatcccatcagctaaaatataggaatcaggcacatccgctatctgattatacgttttaccttcaccgtcaacttccaaagtatatttcccattaactttaaaatctcctgtcttctttccatattctatttcatgatcacaagaaagttgattcactacaaaagtttcacgtgctgttcctattttcacaggatgagaagccaaagcatacaacagattaggattatccaaataaatcttatccggcttttgcatcttcttgacagataataaatccgcatataagagatgcagtagttttgctttttccagactattcaggtattctataaccgtgttacgatgaataccgatagttgtcgccaatttggatatatccacttcaaaaggaacagaggacgcaagaatacccaacaaggcttttatcttacgcacattacccacatcaattccacacaactgaggtaattccgtttctacaataaaattaacaacctgttctatgcttgtgtaatagtctatctgatttttcaaataaaacggataatatccatactgcaaatattctctaaaaagaggcaaaggacgacacactttgttcacctccgagcagatatttccaggagaagtcagaacctcttccaaagtacatataggtaaatccaactgtttataaaacaataaaaattcccgaaaggaaagtccctgcatttcataagggatacaacgccgggataagtcagcgtcagcattcaatatattaagtaaagaggatgcactgaacacaactttcaaatcgggatacatatcatatacttcttttatctccttgctccaagtcggatatttatgtacctcgtccaagaagagatgcttccctccatttttcacaaacacatccaccaactccaacaaagtatgattggagaaataaacagagtccagcgtacaatagagcacttccctgctataaacctcataatgctgcttcatatactgcaacattaaagtagtctttcccactccacgaggccctttaatagcaaccaactgggcatcccaattgatctgatacatcaatgtccttattatctcggttgatgtcaacgacaacaaacgatcttgtttcgcaaaaagagtttccataaatttctatatcttagtactttcaaatacaaagataaccatttgctgtttgaaaacagcattttccgctactttttgctgtttgaaaacagcaaacgaaaattatttcaattttaatcaccggcacgtacctcacgaacgaatttctgaatttcaaagggagattccactttatccacgcttgcataataaggaagcagaaaacagacaaaaccttcttccacttcacgattaggaaaacccaaacggtaaatacccaattcttcatcatatctcttaatagtaaggtatccactctgataaagcaccggacatcaagattatcgtataactcctgttcgctgacaccacaaatatctatctacttattccacattgatatgtcatccaggttattcaaatcactgaatacgctaactttgccgaacttggtaacccccgtcaacatagtaaacaatacaaccatcctagcttttcaatgcgccatagaaagcttctaatgtattacggaaacttttttgcaaggcatcatcaccaatagcctgtagcatcggtttatcatactcttccacaagaatgaccacacgctgcccttcctgtcgacaagcacgcttgataataccctcaaaacgcatcgctaaggattttcccgaagactccgcgccatacatcttctcccattctactaacgctccgttcagcttattctccaaactctccggaatatcatatttctctgtattaagatcaagatgtaataccggatattttacccagtctttttccaacttctccatagccaatccaacaaatagttcacgctttccttggaaataggcttcaagcgtagaaataagcaagcttttgccaaaacgacccggacggctaaaaaatagtaattcccagtttttaccaattgatggattaatgctgttttatcaatataaaaataaccttcctagcgatttttttcgaagttctgcacgctgataggataaattttactgcccatatttcactctgtttaagttcacgccatacaaatatacatagaaatatctgaaatagatgcaaattctaccaaaactgcctgacagaggtataagacatgtaacaacatctaatattatctactcaagaaaagcaaattcagtaaaatataattgaaaaatcatgtttataaacatccgctttattttgatatttatggatattatttttactttaggcaattataaatcctaaaaaataatattatgaaaaagattcattggttatttggcttattattatcaatttgctattcatgttcagaacttgacgacttctctgtcgaatcaacttctgaatctctgtcgactccaacgactaggtatgctggagatgaaaaatatgacgtattaggctatggttatgatgtaacaggtgaatacttgcatcctttatccgtccggaatcccgttctgaatatagcaaagtacgaacaagagcatttcgatcggctgcaatataacacttcttcctatggctttgatcaaatgtattatggatattctgcctctgattacacaaaagatattacaaaagaaacaaaagttactactaatatgagttatggtaacgaaaaggtggatactgttccctatttttcaggtaacataaccagtaataattatttaaaaacagagtacgcttattctgataaatattcatttgcaagcgtagatgccgttagaaatcggaaacatatttggattaacgacgaaattagtctcctctctaagtatttatcagaaagttttaaagcagatttagaaaggctatctccaagcagaatagtagaaagatatgggactcatgtattaacagatttcattatcggaggacgttacaaactagtgtacagatctgttattacacattcaaaagatgcaactcataaaaagaagactgtagcatccggatttaaggcagcgttgttcggtattggtttttccttgaatatctcaagaactattcaaacagatgaatcactagttaaagataatcagaataaagaactttttgttcaattctatggtggaaacggtacaagtttgagatacgatttagagaaaggaatgccaacaggagtagatgtgcagagttgggagaatagcataaatttaggcaatagctgtctaaatgaaataatgtgggaggaaacttatccgatttatgactttatttctgatccagtaaaaaaggaagaaataaagcaagctgtcatacaatatatagaaaattcaaaaattaatgaactcaatttacttccattgtatacttatttattaaaaggtgatatatcagaccatctcgtcacaacacatcctgcaatagaagagtattggccggaatatgagtttgatcaaatagaaggatacattttaaagaaacagttaccaggaacaattccattatatgaatattacaccgatgcaggcacaaatcattatgctacagttgtttctgattttgacaaaacatatcccttttatgagaagaaaggaattatgggttatgtttatcaaaacacaacaatggaaacagttcccttatatgaatatttcagcgatgaattgaatgatcattatgcatcaacgatacctaacataccaaccctttttccaggctggagacgtgttaatgtaggtaataatggatatgtatatcctcctaattaaaaattaacttgaagccaggcactaaaaagcaataaaagaggctgtctcaaaatagaaaaatgaggcagccttacttataatctgtaagttgaagtataagaatccccttattttagccttatttccttaataagaaagggcaaaataaggggatttttctaaagagatttcaatctataagtttttcgttcttgaaattctattttgagacagcctctttctatttacacaatcttatagatagtcccatttattagaaacacgaacatttactgaatatcctacattacggtcacggggagtagaaacggttacttcacccaacgaaatctggagctgtttctgcatcttactgttacgacgattacccatctgatttcttcttctgtaagatatgcatcttctcgccttccaaagctgcattaaggatacttgtcaacaacggagcaaaagcatcgtctttacctaacaaaggcttgcctgcttttagctgttcaatagtcttcttcctgatactatcaaattcttctttcatacaaaaagctgtattagcaaagttaatattttcttctttgttgacacagtttaatttacatactctgatttgttgtcagacaactaaaagaccagacttccctgaaaattacaatattctgcaagacatctctggaatgctcacataaatcccctaatttataagagaatatcagagacatcttgcagtaaaaaggaaagtatcaactactcatatcatactattttgataagatatcattcggagcgacactggtattatggaatatcctgaatcagaccttcccaacttttaatgccaatccgttccagatattgtttaaagtaatcatcttcttcatcagtacccgctttctgataggtagtccatacaggtttagcttctcccttatattcttcatcgctgtatttacgtaatcccaaaggaacaccatcgcctaaatgatcaaaccagctatgccattggattccattaataccgtccaaagcattaattttcttccatccataagcaaatccggctgcttgatcctgcaaatctttatcttcatagctcggagagcatgttcctgcttcagaaagccatacagaacgcctgatatttcccttatactggttctgcgaaataccaacccatttatccagtacttcaagattcttcagtgtcacatattccgtatccatagagaaagtcgcctgagcgtcatcccaagtacaaggatttcccagctgtgccggataactgtggcatgccaacgaccagaagaaatcaccttcagccttactaaacagattcatcagatcaagcatatccctcactttataccagccaccgccggcggcaatattccacccatgcgagaaagaaatgaacacttctgaatgctggtcatactgatgtacaatattataacacatacgcattgaacgaagataagtatccataaatgtggcaatcggcttatctcccatatttgtccaatgaattcctccatctacctcattatggataatccaatgtgctatacgcatatcgggatcactatatctttgcgctaaaaagtcaagtgcagcagcataacattgagtagactctaccgtagtcatattgggcattgtataaggagccaccccgttataatccggatgcttcaggagttcacctgcatctccggaaggagcaatcaacaaaatgccggctacagaaattccacgttgactggtctgttgcaatactacatcaaatgaacttatcagatattgttcgttaaaataatatgtttttcctccatatgtatacggtatgtcacctggctgctcagaaagatgcataaaattactaataggaatattgatagtagcactgctgattcccaactcatccaaatcatgtgtcaataatccatgattaataagtccgcccaatcctttcttcgatttcagaggaaccgcttcgacactttgttttgcatgaattgcatctacattagcataacgtgcatgagaaacaagctcatccacatccgctccttctttaaacacggcccatttggacaatagacgatcatatttaaaatctcccacagtaacatagcgatctaactgtatggagaaagagttttctgataaaggaattttaaactctatcttctccgttttaaacatgtccacaaaaggaggtatttcgcccaagaagaaagtaccttcgcccgtataatctccctggatagttaccgatgtttctccaaccgtaacatctgtgatatggcaggcatattctttactcagataatctttaattccttgctcatacttctctttattcaaggcttcattcttttcttcctcttcttcctttttctcttcgtcgttcataacacgcaggcgaatgttacgcatctgtatggtattattaggatcagttccaaagtccatacgcaagttatctccttttttaccccaattaaaattctttcgatattctttcagacgaacactaaaagaagcccattcttcagaagccggcacctgccccgcactcatactatgcgccggatcaattcccgtttctacatccataaagaaaagttcgagattactcatccccaacgttgtctgatattcaaattcaagtacattacattcctcaggcacatcttccgcaaatactccggttgtcgcccatggatcaccatcagttgtttctatagtacaagtactatcctcatgtaaagtcaaattaacccccgacttatactttccattcaataacatataaacaggtggagtaacagtctcctcaggaggagtaacgggaggctctacattttcctgaaaatcgtcctgacaggaaattaaattcacaatcaaaaatagtactcccaacaatcccacacatcgccctacaaagcgacccagttttctcgtgtaaaaaactctcagctttctcataatttcagtttttagttaattataaacaatcagaaattttcaataatattccaatcagaaattccaattataggtaaaaattgctcaaaaaattcatcttcttcgtgtgtgtttgctttttggtagacataccatgcaggtttaggttctccattataagattcatccaaatatttacgtaaccccaaacaagcaccatcacccggatgatcaaaccaattatgccattgccaagcatcaatgccttctaaagcattaacctttttccaagcataagcaacccctgccgcctgcttttgaagttcctcatccgaatacccccgcgaattcacccctgcttccgaaagccatacagaacgtttaataattcctttatatttattttctttatccaaagcccacttattcagaacttcaagattcttaaaagtaacaaattgagtattcatagaacaagtagcattcggatcattccaagtacaaggattagtcaaatcctgtgcataactatgataagccagcccccactgaaaatccccctccactttgctataaacgtttaacaaatcaatcatttccttacaggtataccatgtagggttggatttttctgtccatgaatgagaaaaagaagcaaacacctctgcattctcatcatattgtcgtacaatgttataacacattctcatagacttcacataggtatcagtaaacactgttattggctttattcccatgttagtccaatctctagctccatcaacttcattatgcataatccaatggctaattcttccatagcgattatcagtagtacaataccttttcgccaaaaagtcaagtgccgcagcataacaattaagtccctctaaggttgtcatattaggcatagtatacaccccaccatcattatctggatgctgcaatatttctcccagttgtgaatcaatacacctagatgctggctctaatagtataattgctgcaacagacatatttcgctctttcgttgctgccaaaagagtcctatcaatcgaattctcaagataccccaaatccatgtaatagcttttccccccatatacatattcaacatcaccagttcttggagtaagatgcataaaatgagttatacaaacattgatagtagcgctactgatatttaatgatgcaaaatcagatatatattgattaggaataatgccgcccattcccttcttagacacaatcttaataggagccaaatgttgagtagcgaaaatctcatctgcatagcgagcatgcgaaactagcaaattttggcctgcttcttctttaaaaatagcccactttgataaaagcctgtcatataaaaagccttccctctcaacaaaccgttcaagttctatttgaaataatgaatttacaagttttactttataaggactattcttcaactccgctacatccatactaggggtaatctcacctagaaaaaaattgccttcgcccgtatattcacctgtcaccctaacagaagattctgttatagacacagaatgaatatggcaagtataatcattatataaataaaagtttaatttttcttcatgtcgaacatcttcctcgctaaaaaaaggaggttccgtttccattctattatcactttcattacaagaaactataactaaaagataacatcctcaaatccgcaactacgcgcctaatatgatacagaagcgaaaagaatctgcatcgttagtaaaaagggggcacagtgcatcgaatgtcaccataaagacatataaatgccccttaccccaccatgcgacttgaggcaatacgcaaaatcacgactataagttgtcggtgttatccaaagtcattctggaacacattggcataagcattgttgcatgaatagatattcagcacatacttccttgatgtcctgacccatttggctggcacagagatgaacttaaagacaaacgtcttgatgcggcttgttgctttgagtccgaacctcttcacgtcaagcctcgccatgatgaatttatagaagttgcgtatgagtgccataagcagaagaaacaccgtgttttctcccataaaggattttggaagcctgttccagccgaatccgttattcatatcatcgaagatgcgttccttccctccacggaggttatagaattcgacaatctctttctcggaagactcgtagtcatttgtaaggatgcagcggtaggtgtattctccttcccacaggtcgagttcgccgtctatccgcttctgtctttgaatcacaagacggtatgccttccctttccatttctcgatgagaatggaggccagctcaaactcaatgccgcccaattccactttcttccaacctctgagggcaaagatgtcattgtagagcgaactgcatcggttagcacggatatagaaggtcttgcagtgtttagcaatctcttccactatctcttcagaacacgagccgcaatcagctctgaaacggttgataataagcttgttttgttcaaacctttcaaagaacctcttcagcgtgtccttctggtggaaacggacatttgtgttgccgtcgctgttctcaatgccgacaatcaagttgccaataaccgccacgccagggcgataaccaaggaacttcttgtatgtaggcttcgcatcaaacttctcagcctctatgaactggtggtcgaagtcaacgtcatacccctcgccctctttcagctgccctgtggacaataggcaattgaggagcagtgtattcagcttgtctgccgtgttgaagtcgtaggtcttgccagtgtcggatgtgtaggaaatgttatcctgggtcagttcctttatggctctaagaatcgtgtcggcactgcatgtgcgaagtgtcggatgaagcgaaaggtggtacatcagatgagtggtgacatcctcgatgcatgagccgccacaaaaataaacgctcataagcgaacggatgatttcgctgtattgataaccatacagcctgcatctcataccgagggttgagtcgattacagatgagagtctggagtcaaattgctccattattgaaaatattcctccaaaaggagtgagtttctcggatttaattgctacctttgccatgtctgtcgggtttgatacatattttgatttgcaacactaagataggtgaaaaatctgacatggcaaattcctgagcaactttttgttgctcaggtacttaaaaagttatatttgtaatagtgttgcggaattaaggaacatataaaagaaaaagcaaaaatcacttgctgcacaaaattacagttctttgaataaaactgtctctttagatttttcatatataaaaattctatatagtttaggtttaggatgcacaaaaatagaataattatagcatcatctataaacaattgctttttttaacaataaaacatttataatgctacaagaatttaggatatctccaatatattttcaaatctttttcttcaataaaacattacaatccgtctagcacaacctcattaaactatataaaaaccggattctggagtaacattttccaatattgctgtgtttcatcattatacaatactacatacttatcagggttgtctgccaacaaagctccaaatttccccaaagttcctttcgtcgttatttgatgtttacaatgagctaacagatataaatccatataacctttatcagagccatttatatcaaccacttctgcacaatctttcacagaaagccttggcaacaagtccattttaacccattctggctcatctgaaaaaaaataaaaataaggtctatacaatttctttttaaagaaagccgtagcatttataaaataatcaaatgaagctggcgctccataagaagatacttcttcctttaaatctcctcttctgacatgaactccaacagaatctacacacttatctatttctaaacattttatctgattaactttatcgagaacaccatcaaccattctatataaagattgaaaagtttcaagccactgctttgatgggaaatgataatatcctcctaaatatataggtggaaccaaactaagaaatgacatatcattagtacgaatatcaccatcattgcccccataaaagtattctcttctatatacatccacttccagttttgacgcttcttcaaactccaaatacgggaaagccttcaaaatatcaaagttcctaacaaattcattgtttatatctaatccccattccttataaaatgtcaaatcataacacactgaaaaacctcttttacgatataaatttcccaataaatattgatgcatctgcgaacaaataccaccgtccatcaatacaacaattttagttcgtaacagtcctctattcagcaaatatttatagatatttctcttcaaatcacccaacatattttaaaagcattaactttaattcgtattaatgacaaatatatgtatatttgcagaatatacagccaacatagcatataattttataagattagaacatgattgctccattactaagcataattaccgtaaactacaacaacaaaagtggacttatccgaactttaaatagtatcaaaaatcaagaaagcgttttttttgaacatatcatcattgatgctaactccacagatggaagtaaagacgcaatcctactatatgaaaaagaaattacatttccactttattgggtatcagagcctgataatggcatttatgacggaatgaacaaaggtataaaacaagcgcatggagagtatctgttttttctaaattctggagataccttaataagcaataccatactacaggaaatagctttagatggtaataaatatatatatggaaatataaaatacatattatcagaaaaagactacagatatattaccccctctgaaacattagatatcgtttaccttcttaaaacagcattaccacatcaagcttgcttcattcaccattccctatttcagaaacaattatataacactgaatacaaaatcatatcagactggatacatacaatggaaagtattatttttaacgattgcagctataaatatatagacattgtaatagcagaagtagacgggaatgggatcagtaccaatcaagaaaaattaatggaagaacgaataaaatggatcaaaagcaagtttccgaaagccatattagatgcattatctgagctatacgagtatcgtatttccgaacttgctcctttcatacagccaatatcacaaacaaaaaaatttaagaaaaggattagaaaattaatatcatttcttttaaaaatcaacaatattatttctcacaaaaaaagaattgaacagaaaaaaaatgagatatggacccccttcaattaagcagctaatctccctccttaaatctaaccaataaaagcgtcaaatacactagcatttacaagtgccacaattcatagttcaagcaccataataatattttagtacacctaaattttacctttttgaatatagtacttcaaccttaagttcccccacaacatggaaaatcggaaagcagaaaccaccctcaattcacgcttagacattgattgcttcaattcaggaaagcatctcaaatcctgtattattctatccatgtcttttttcaaattacgtatcttcctccaaacaattttttggaaagtatttctaatatgaaaaaatgccaagtcttttttcataaagtctatcactcccttttgtgcaaggtaaagttccaaccaacttctataaaattcaaaattcgcaaatttgccttcatcaaaattgcaagaatgagaaagtgaaagattccgaatattataatctaaaataacatattctatagaaacaactttctttgaacgtaaaagcaactgcacactccaaatcacatcctccccaaaacatatatttggatatatctccattgggtcattcaacaacaattcacgtttatgaaatttagaccaaacactccaataagccttattatttaatatttctttaaggtaatcaataccagacatacttgagaaattaaaaaacgacgatttataagaggtaccatctaaataacaaaactggaaaggggcaactacaatatccgcattgctagcttccgctttatctagcaaatattcaattgctttttcatgcagacaatcatcactatccaaatattgcacatatttccccttagctattttcaagcctttattcctagctagggcaggtcctccatttttctgttccaacccgattatacgcttatccaattttacatatcgatctattatcaatgatgtattatctatgcttccatcatttacaacaataatctcaatatttgtatagctctgacatattacactttgaaggcatttttctagaaaaatttccccattgtaaacaggaacaataacagacacaagtggtagtaatttatccatattacatttatattatcaacatttaggacatacaattcgtcagttttcctccgactacatcgtccaacctcaatttacatatatcaatacctacatactagaccctgccagttgtttctaatcaggaaaaatgtcgccaataatatattggccaaaaatagacaatttttcttattcgtttgcgataaaaaacttctaactctcgagaaggaaattttaataatgttttaaatttagctctcatatgctttattggcttctgaaaacacctcggtttcgtcaaaaggacaaactcctcaaaagtaaaaaaacatatacgaataagcctattccttacttccaataattcttctccttcaaacaataagtgcttctctataaactctatccgagaaaattcagccataaaataatgatatctattcaaaggagtaattaaatgacaaatactactactgcgttcaacataatgataaaacaccttatcaacccaagctacctgcttacattgcaatatccacatatgcatcgcaattctatcttcataaatattattttctggaaatttatactctgaaaagactgttcttttaaaaagctttgtacaagacgaacaattcaatttatcccacatcatatctcttaatacatccaacgatgagcgtatatatatctgtccggagtttttatcacatccttcaattcgaccatccaaatattcagtctgaaaattagaatagacaatatcaacatcatgacattttatcacatcaaataactcctcatacatattataatcgatataatcatcactatcaacaaaaccaacatagggagctgaagcaatatctagtcctgcattacgagctattgatgcattggcaaccggaagatgaagtactttcacacgagaatcaaaagacatatattcatcacacaatgcggcagagccatcatttgattgattttctactagaattatttctatatctttcaaagattgattacgtatcgaatcaatacacctaggcaaatactcaactgtgttatggacagggacaattacacttactaaacaatccattcatttattatataaatcgttatattcagcaaatatacataattcctcactaccccacacaacaaaagtaacaaaaagccctcttccctattaaaaatagctaaagcacttccaacaattttatcatataacaaacctacaaattcaattcattattattatatttgcaaacacatttaaataaatgattatgacccaacccacattaagtatcataactgtaaatttcaacaataacaaaggattaatagcaactctgaatagcataaagaatcagtcattcacatcttatgaacatatcattattgatgcgtgttcaacagatggaagcaaagaaacaattataaaatacagtaaagaaacttctcatttggcctactgggtatcagaaaaagacaatggaatatacgatggaatgaataaaggaatagaacatgcttctggagaatatctatattttctcaactctggagattgtcttataaaagatgttttaagacatattccttttgatggcacccaatacatatatggcaatataaaaattataccaacaaacgaagatccatggatatggaaatacccagatagattcgacacattctttcttgcaaattcaaaaggttggatttcacaacaagcttgttttatccaccattcattattcatagaacaaaaatatgatactaactataaaattatatcagactggatacatgcaatccactctataatcttaaaaggatgtagctataaacacattccaacaactatcgttgaatacgatggtggaggtgcaagttctaattatgagaaaacatgggaagaacgcaacaaatggatagaacaaaacatcaataaaacctttttcaaatcatttttagaactagaggctttcagggaaacagggcttggtaacttagttccgttattaaataaaactcacaagttcaaaaaacgtataaggaaaatcatcttatttttatactacataaattcatttttttcatttcataaaccaaaacaataatgactatgaaatcgctttttatcatatatgactatcaaatattcgaaatgcaacgctttggtggtatttcacgttatttctgtgagataattaaaagaatttcagcaaaacataaaatcaccgtgcgatattctatcaattattacctcacaagttggatgttggaaaaaagcctaatattattgccaagatttatctacaaacgatatcattccttttttgaaaaaaagaatcacgaaataacaaaaaaactactaaaaacaggtggaccatacttattacaccctacatactatgatccatattttttagattatattggagaaaacccatacattattactgtacacgatatgatccacgaaaaatttccacaatatgtaacagatgcaaatatcacaataggtcataaaaaaaaggttataacacgtgccaatcgaattatagctattagcgaaaacaccaaaaaggatatcattgaaattttcaatattaatcctcaaaagatagatgttatttaccacagcacaagcatgaaacacttttcgggaaaacataaattacaaatacccgaaagatttctattatttgttggcgatcgtaccccctataaaaacttcaaacgctttatggaaacattcgctcaaatacatgaacaagataaaacactatttgcaatttacacaggaagtaaactaaaaaaagacgaacaagatatgcttattggcatgggtatattcgaatatacgattcatataaaagcttctgatcaagctcttagtgaattatactccagagctttactattcgtatatccttctctttatgaaggctttggaattcctattttagaagcctatgcatgtcactgccccgtagcactcagcaacactagttgttttcccgaaatagcaggtgatgctgctgtatattttgatccatactctattagttccatgtctgaagctatcacaaaagtaatatataatgaagaaaaacgttctcaattaatccgtttaggtaacgaacgtttaaaacgatattcatgggaaaaagcagcccagaaaacagaagaggcttaccaaaaagccatacaatcatgaaaacaatgtaaaatcttacatatatgaatggaccaatacttagtataattactgtaaactttaacaataatcttggtttactcaagacattagagagtgtaagttcacaatcattttcatcatatgaacacattatcattgatgcaggctccactgatggtagtagagaaactatcatacaatatgaaaaagaaaaccctcatctaagtttttggtcttcagaatccgacaaaggaatatatgatggtatgaataaaggaattgatcatgcaaaaggacaatatctatatttcctcaactctggtgattgcctaagccaagacattctcgcaaaaataccatttgatggtacagaatacctatacggagacactatcttattttataaaagaaaaactaaaaaaagagtatacccagacacattggatctcatatatctatcagataattcactacaccatcaatcatgttttatacatcataccttatttaaagataaaagatatgacattaattacaaaatcatatctgattgggcacattgtttccagtgccttataattgaaaaccgcacttatcgccacttaccatatattatatctgaatgcgatggaagaggtataagttccaatgggaaagaacttaatcaagaacgtacattatggtttcaaaacacttttcctgcaacacaaagtaaagtatttatagactgcgctgcactagaccgttcagggtttagagacatcattcatattttagcaaatacacacaaatttaaaaaacgaatgaaaactctcattctatttttatataaaataaataatctattctcatataagcacaaacgtattaaaaattaaagctctaaataattgctattctgaggatagtaatgtatatttgcatgtttattcttcataaaatatctggaatatgaaaaaagggatcacaatatcgttaatcatcgctacatacaactggccagaggctttgcggctctgtttggatagcattttaagacaaacgatattgccttctgaaatcatcattgcggatgatgggtctgatgaaagaacaacaaaactcatacatgagtttacacaaaatgcttcctttcctatattccacgaatggcatgaagacagaggatttcgtaaaacaatagtattgaataaagctataagcaaagcatcttcctcttatatcattcaaatagatggagatatcatagctagtccaaattttatagaagaccatgtatatatggctgaggaagggtgttttattagaggaacccgagcaaaccttaatgtaagagcgaccacatctttactagataaagggaaactatcaataataaataaactccagttaataatgaagcaacctacaaatgctttacgactttatcccatgattgcgaagtttgtcactcgtaaagaattgtcaggaaaaagagtaaaaggatgtaatatgtctttctggaaaaaagaccttattggtattaacggatatgacaacaatttacaaggatggggacatgaagatgaagaacttagttggagactagtaaactcaggcatagaaaagaaaattattaaattttcagcaatagcctatcacctgtaccataagcagctctctcgcaaggaagaaccgcatcatagagagtttatgaagactattaaagaacaaaaaataacccgaacaaataacggaattgaagaaatctaacaaaccaaacctatgacagtttcattgattatctcaacatacaactctcccaaggcactagacctttgccttatgagtgtacttcaacaatcagtactccctgacgaggtactgatcgcagatgatggttccaatgaagaaaccaggaaaatagtggaagaattcaagaaacaatctactgtacctgttatacacgtatggcatgaagataatggcttccgcctaactgttatcagaaataaggctattgcaaaagccagtatggactatataattcaaattgatggagatatcattttgaatcatcattttatcaaagaccacaaacgctttgcacgcaaaaacagttttgtaagtggtagccgtctcaatatacaatctgaactttctaagaaattaataacagaacgaagcatacgtgtttcaatccgtaataaaggagtacataaccggctcaatggaatacgttggcaactattgacatatctcttacaaaactaccaccggacagatctactatatgtacgcggctgtaacatgggtttttggagaagtgatttattaatggtcaatggatatgatgaaaacatgattggctggggacgagaagacagcgaaatagcctgcagactaattaatgcaggtgtacgtaaacgtatcatcaagaatgccggcattgtgttccatttatatcaccaagataattcacgggcacaatttaatattaataacgagatactacagagaactattgatgaaaagcgaatttggtgctccaaaggagttaaccagtatcttacagagaaaaaatagaaaaataaatatgagacaaaaagatttaaactttttagacagaaacgaatttaactacagcccatcaaaagaagtagtagaagcactcaaaaacttcgatataaataaactttgcttttatacccgtatttacgatgaaggcaaaaaaagcattttatccgttttcttatctgaattatacgatatagacgagacgcaagttttattagggtacggcggagaggatattctgaaacaggccgtacattatttcctcacagaagaagacggaaacacgttcaagtacgacttcgccgccatgaaagatatgatacaaaaagaaaatccgaagattttactgcttgcatcgcccaataatcctaccggaaatggtctgactccggaagaactggatgagttgctggctgaagttcctgccaaaacgaaggtcttgattgacgaagcatacgcctctttcgtctcaacagacacaagatatatcaaagagttggtgaacaaatatccgaatttgatcatctcccgcactttatccaagttttacggcttgccggggttacgcatgggattcggtttcatgagtaaagaactggaaaaatttagcaaatacagcaacaaatatctgggatacaaccggatatctgaagacatagctatcgcagcactcaaatcggatgcacactaccgtaacatcgccaaactgatgaatgaagatcgtgcccgctatgaaaaagaaatcggtgtgctgcccggatttaaggtatacgaatcggtagccaactttattttaatcaaatatccgattacattaaaagaggcactgcaaaaagcgtttgccgaacagagttataaagtgaaatttatgaatgaaccggatatcaacactcatctgcgcatcacgctgggacgccctgagcagaaccggatcgtcatagatacaatcaaagaaatcgcatccaaatgaaagctgtaatactagccgcaggaatagcctcacgtctacgcccactgaccgacacaactcccaaatgcttgctcaagataggagaacgttgtttgttggaaagggctttcgacgctttaatacaaaatggttttaacgaatttatcattgtcaccggatatcgccagcaacaaatagtcgactttctgcaagctcattatccggctcaaagtattactttcatctacaatgataaatatgaatcaaccaacaatatctattctttgtggctgacccgcccttatacggaaggggaagaggtattacttctggatagtgacatcgtatttgatccccaaatcgtagagaagttgctccggtcggacaaagccgatgtactggcactcaaccgccacgaacttggtgccgaagaaattaaggttattgtggacaatgaacaaaaggtaatggaaatcagcaaggtttgctctatacctgatgcaatcggtgaatcaataggtattgaaaagatgtcggcagcatacacacaagcgttattccgcgaactggagatgatgatcttatcagaaggattggacaatattttctatgaacgggcgtttgaaagactgattccacaaggatatagtttctacgtaatggacaccaccgaattcttttcggcagagctggacacggtagaagatttccaacaagcacagaagctgattccggctagtctttactaatataaaatttgaatagaaatggccacttacgatattcgccccttacagcttcgcatcttaaagaatttactagcaatagataaagtctgtaaagaacataacctgcgatattatatcatggcaggtacgatgttgggagctgtacgccacaaaggatttatcccctgggatgatgatctggatattggtatgccacgggcagactatgatctattaatgactaatgccaaggaatggttgccggagccatacgaagccgtatgcgctgagaatgacaaagaatacccgcttccgtttgccaagatacaggatgccgacacaacattaattgaacgtatgcatcttaaatatctgggaggcgtatatattgatgtattcccattggacggtgtgccgacaggccgtatggcacaaagaatgcattttgccaaatatgaattttacaaacgggttctttacctgattcaccgcgacccgtataagcatggaaaggggccaagttcatggataccattactatgcaggaagcttttcacactcaccgaagtacagaaaagcatcagagaggttatgaccagatacgactttgacaagagtgatcttatttgtgactatgacgacggcatgaaaggaatcatgccaaaaaagattttgggagttcctacccctgtcttgttcgagaacgaagaagtatggggcatacaggaatatgacacatatctgtctcagaaatatggggattatatgacgattcccaaacagagtggacaaagacaacataattttcattatttggacttgaataaaccttatcgggattttgaagtctaattataaaccatataagcagtaggtaacaacagagatgagaataggttttgacggaaaacgtgcagtgcagaatttcaccgggttaggtaattatagccgctatgtagcggatattctttgccacttctatccggagaatgactatgtcctgtatgcacctaaaaaacgggaaaacaaaaggatgaatctattaaccggccaataccggcagctcactctcgcctatcctgctacttctttttggaaaaaactaagttcattatggcgcgtatggggaatcacctctcaattggagaaagaaggtattgagttattccacggactcagtaacgagcttcctctcaacatccataaaagtcgcattaaaagtattgtaactatccacgacctgatatttttgaggtatccgcaatattaccaatctattgacaggaaaatatatacatacaaattccgtaaagcgtgcgaaaatgctgataagataattgctatcagtgaatgtaccaaacgggatattacccgatacttcaacatccctgatgataaaatagaagtcgtttatcaaggatgcgacgtctcatttactcatccggtgacggaagaaaaaaaggaggaggtacggaaaaaataccagttgccggaccactatatacttaatgtaggcagcattgaagaacgaaaaaatattcttgcagcagtacaggcattgcctatgctgccgcaacatattcatatcgttatcgtaggacgccgtacaggctacacaaaaaaggttgaacagtttatcaaagataacggtttaggcgaaagagtgcatattatcagtaatgtccctttcaacgatttgcccgctttttatcaatcagcagagatttttgtatatccttcccgttttgaaggtttcggtatccccatcatagaggcactatattcgggtattcctgtggtagccgccacaggctcatgtctggaagaagccggagggcccgactctatctacgtaaacccggatgatatcaccggactggctgatgcatttaaacaaatatattcaaattccgataaaaggaagaacatggtggagaaaggacgggaattcgcgaaacggttctctgagaaacaacaatcggaagaaattattaacatctacaagaaactaatacgatgaacatacttaaacactcaataaagaaatttatatatggtacgcttccatattattttatgaaagggtataagccggattctccttatctgaagtattataaatacatcagaaaacatggatattcaagacacttatacgaattcaaagatgagtatttgagtatgcctgtcgatgtacggaaagacgaaaataggaatttgtattatgtactaaaggaggatggtaaacgcctgtacttccaaagaacaacacctccccataaaatccagaagtattacagggcgttgatgatagagcaagaccaacgctccgcacaccattatttcaataataataaggacgtaacgggaaaggtttttgttgacgtgggatgtgccgaaggatattcttcgctggagattatcgaagaagccaaacatgtttatttatttgagcagaacgaatcgtggctggaagctatcagggccacttttgagccatggaaagacaaggtaaccattgttcagaagtatgtgagcaaccgtaattctcccaaagaacagaaactggacgatttcttcagagacaaaccggacgagcatctatttataaaaatggatatagaaggggctgagcgccgtgcgctggccggatgtgaacagcttttccgggattgcaagaaaatagatttcgccatctgtacttatcacctacatgatgacgaggaggttatttctgcgtttcttgataaacacaactgcacatacagaaatcaaaaaggatttttcagacacaagatcaggagtgttgttcttcgaggcaacaagaaagtaaattaactaccgatagtcagaagatagcaaatcgcaataatcatacttacacaagtaggtatcataaatatgtttttccttcgctaataaataatgcgagaagtgaggctcccaggaaaggaacttacgcgtagagcgacataagcggaacaataaaatatgcgaaacgatatgttttgacttctcttttcgggctgcacgacggtaaatgtagtgggtaaagaactgatcactgtaataaagagcgagcttgacagtagccgccacatcccaaccccgcaaagaagcatattcggtcattatatatgccagcacttcccgggatatgcacagacggcacatattacggcaaactttatcacaatctatttccggtaataactgcatacggttcacatcaaccaaagagaagctatattcatttgctccattctgatgaatcagaatattgccgggagaatagtccaaatgtaaaatacccgcctgatgtaatgcaaaagtgtaacgcgcgaacgccagtaacttgtcttcatttccctcaaccttaccgtccatcaaataacgaacggtttcaccattgtcatagcaacaaacatagtagctgtttgtaagaagacctttctgaaattgttcgatcatggcaatcggttccggagtattgaaaccatgcttctgaagttccatggaatagatataggagcgggcagctttggattggcggaaatatgaatagacaacacgattaatgatgtgaggctttttaaagcttttcacaacaacatcaacgttatccagactaatccgttttagaatattacgcccatcatacaccacctttccttcatccgcaaagaacttgggaatctcctctatctgtttttgcaaatgtgtgtacttgggatttacaatcactctcattacactcttctataaatcctacttacaaagattgtgcaaagataaagaaattagggcatattccgactatatttttttcttttatcgcaaaactaagataaaaggggacaatttagccctttatttcgactcccaagtctgcgcaggcttgctttattgccttaaagcaataatatccatgcgaaagtttatcggctatttgcaatacatttttcttcatttccatgtattgtcctgcacttattttaggtaaaatatcttcaagttccgtcaaagaagagatacatatacccacattgttcttcttcacaaaaggcgccagcccggctttctcccaaacgataatcggaagaccgcaacgtatgtagagagacattttatgaggagcgttatattgaagatattctcccaaagcaccacttcctccctctaaagaagatccataccaggcaagtccatattcgccttctgccgtcgctatcagctcgtccgaagagacaaagcctttataatcaacttttccttccagtttttcggtttcaagaccacttccatagagcactatatcataagaacggggagaatttgcctgtttatataagaaatcattatgataagaagacaaagcaccgacaaacaggatgcggttcggtgatttcggcacatcattgccggcaacaggttggctatcggataaataatcaaatatctccaatatctgcagcttggccttaattccatgttcaagcagccagtccctcatacgttcactatgtactatcacacagtccgagtgatccaagcgcgctatttcttgggggatagtcagcttcttacgacgaaaactacccaaatcatgaatcaacgtcaccaccttgcagccacgtagatgagccatattgcagacaaatgcataatatttcttcaaaggatattgcagtaccagcacatcgcctttacgcaaacagagaatactcttcagcacactgaataaggtacgacaaaaagctacaacgacatttctataccgggtttgtttcagcccgacattccggaagccatgcgactccattatctgttcaatgtctgtttttgctttatttccggcattatcgacacctcggtaatttcttgatagataacaaatcataggaatgatattttatagttcattttgcgccaaaaccaatgcggcagccactgtatcgtccatatcaaaataagcgtattgagctaaacgtccgccaaacaagactccgggagtatgtatagccaactccttgtatttctcgtacaaccgcatatttctctcgtcattcaccggataataaggttcgtccccgggagtgaatgcagaaggatattcgcgggtgatcaccgtatgcggctgcttaccaaattcgaaatgtttatgttcgataacacgggtataaggaatctctctttcacaataattaatgaccgcattcccctgataattttccatttccagacgttcgtgttcaaaacaaagactacggtattccaaatgcccgaaacgaaaatcgtaatactcgtcaatacatccggtaaacaatactttatccaccagcgaatccagttcttcacgagcagaaaaataattcgtccccaaacgcacatcagctccttcaaacaaactttcaatcagcttattgtatccgcctttaggaatgccttgatactcgtcattaaaataattattatcataaacgaaacggaaaggaagtcgttttataataaaggccggaagctccgttgcaggacgcccccactgtttttccgtatatcccttgattagtttctgataaatatcttttccacaaagcgtcaaagcctgttcttccagattggcaggagcctggatatgtgcatattcgctacgttgttcttcaatcttatccttagcctctttaggagtgttaactccccataacttattaaaagtattcatgttaaaaggcagattatataatatgccttcataattagctaatggagaattagtgtagcgattaaatgttacgaaacggttcacataatcccagacttctttattgtctgtatgaaagatgtgcgctccgtaaagatgtacatgaatgccatctatattctcacaatagatatttccgccgatatgactacgtttatctataacaagacagcgcttgcccgcatcaatggcttgacgaacaaacacagccgcaaacagccctgctccaactaccagatagtcatattctttcatatacattcaaaagctatttatgattaatcaatgattccctcaatctttgcaatcacctgttcgggagttatatccctcaagcaagcatagtcgccccgccagcaaggcttctgtccataaaccgaacaaggacgacaggataaatcaagttgtactgtattgaccggtaattgtttccaccccataaacccggcataaggatgagtggctccccaaacggaaaccacaggtatattcaccagagatgccaaatgcatattagcagagtccatagacaacatcacatccagatgactcatcagattcagttccgtacgcatattcaatttaccgatcatggaaaccaccgaaggatatttggcaatccaggagtcaaagacttcctgttcgcttttcccaccgccaaacagaaaaactttcaccgcaggattagcagcaaaatgagcaacaacctgttcctgcaattctaacggataaatcttgcccttatgcttggcaaaaggagcaataccgatccatttttgttttcctttcggtcctgtcatcggttcaatctctgcgaaatcaccctttccttctccataaatagaagaaaagttcaataaaaccggcagtcccaacttttctaacacatcagcataacgacggaaagaacttttctggttctccagcactttatgacggcggcgaaccagtttcttttttccggctctccctttacaaatgaaagcaaccggtatattggcaaggcgaaaccgcagacacagatatttcgaacgaagtacgtgatgaaagtccgccacgtaatcgaaatgcattcttttcagttccgaataaaggctgttcaatccccatagccctttatgcttacctgtcagatcagctccgacaaaattcacattttcaggcaaactttgaaaaagaggttgccatacggcacgacttaatacagtgatttcgtgctgtggatattgcacagcaagcgaatgtatcacaggtattgtcatggctacatcgccaagggctgaaaaacggataatgagaatacgcgccattcgttatttttttgcataaagcaccggattcaacgccgggtcgttatacatcttcatctgtttatatactttcatatattttcttccggcttcaatgtctgccaacaactgttcgatagcagaagaaaggtctttctgctgttccaacagaatattcagcttggtccggcattgctcacgatgttcttcggtagtatccgtacgttccacctcctgcttcatgtggtaaattttcaacgcaagaatagaaagccggtcaattgcccatgcaggactctctgtattgatagttgcatcagaaagcggtttaacagctttgtatttgtccaaaaaataactatcaatcagttcaaccagatcagtacggtcttgattggacttatcaattcttcttttcaaagccagtgcttctacaggatcaatttgagggtcacggataatatcttcgaaatgccattgaacggcatcgatccaatttttcaagtataaataatactcaatcgtcttcaactcgtaaggattgttcatcggtgcatctacactgtccgttacgtggtaatcagtcgtcgatttccaaaaaatctcgttgcaaaggttactaaatgtcataatcttaactagcttatagatatataatagggcaaatctatgtaatatttttcagacaagcaaccctttcttacttttttatttcctacctttgtgggaactaaatacagattgtatatgaaaattattatcgataataagataccttatataaaagaggctgtccagacaatagccgacgaaataatctacgcccccggaaaggattttactccggaactggtacaagacgcagatgcgctgattatccggacccgtactcactgcaatcaggaattactggaaggcagccgggtaaagtttatagctacggcaaccatagggttcgaccatatcgatactgaatattgtaagcgggcaggtatcgaatggacaaatgcacccggttgcaactcagcttctgttgcccaatatattcaatcttcactcctgatatggaagtctttcaaaaataagaaactggacgaactgactattggaatcgtaggagtaggaaatgtggggagtaaagttgccaaagtcgccgaagacttcggcatacgcgttctactgaacgatctaccacgggaagaaaaagaaggaaaagaatcctttacctctttaaataagatagcggaagaatgtgacatcatcacttttcacgtacctttatataaagaaggcaaatacaaaacattccacctggcagatgaagatttcttcaattcgctaaaacgcaaacctgttatcattaatacttcacgaggagaagttatcgacacaggcactctcttgaaggcattgaacaatggttctatctcagacgctattattgatgtatgggaacacgaaccggaaatcaatcgtgaattattagagaaagtgattatcggcactccacacattgccggatattccgctgacggcaaggctaacgcaacgcgaatgtcgctggatgcaatctgtaagttcttccatatagagggaaagtatgaaattaacgctcccgcacccacctctcctatcattcatgcacaaagtcaggaagaagcattgctccaaatatataaccctgtcgaagacagcgaccggctgaaagctcaaccggaactgtttgaagaattacggggaaactatccgttacgaagagaagaaaaagcctacataataaaaatcgaataaaacaatttctcacatatatttataaagttcttttcaactcacctgctatcttccgagaatgcatcaccacaccttccctaatcagatgataacgcgagtcatagaacatactatcaggataaacacaaccggaaggttccaaataataaggaaagcctatagccttcaaactctccgagatacggttaatggccaaagaatcattttgaaaagaagaacgacaatatggaggaggcaagaagaaaatagtcaccccccgctcacttaaaatagatattttctcttttaaatctataaaaactttttcatcgggtgataccataggtaatggggcactgtcccaatgtccggcagaagatagattataatgtccggtataatcaccatattcattatatttggtacgaacttccatattctccggtatatcttctatatccatacctatccgttttacacgtttacgaatcaagcgatacatcgaaaaaaaattatgtgtatttaccatattatataaggcctttccccattcatgctttatcagatacatatcagtcagaccttcatccccataataactgccctccttaagaaaatgattatattctgcagaaacgagcaacacatctccttttcgtaaatggtcgtaaacctcctcaaacatataattcaatcccaacccgatatgtattcccatattcacaggttccagatgtaatgtatctctcagaatggaagaatcaaagccaaagcgggcgttagaaccacctattattagcaagcgggactgatttcccaattcttccaaacgcttttctttatccagtgcagacgcataattcacatatgtcaaatcatcttgccatgctaaaaagaccaacgttccccaacacaatgcattaataacagctacgggaattaatgctaaaagaagatttcttaagaactttctcatattccttatttagaattgaaaataaatgaactccgaggacttacccatggttatctctatgaataagattacaaacgtcaggatagcaacgcgcaatgatttactttttagaaattgaatctgcaacgcatatggcttatctcgctgaaaccattccagaatccagaaaagcagaatatacaatcctacctccaaagagtgggaaggcatattgccggtagactgttgcatagaaaaaagtcgtccgatatagccgatagcttgttccatattttctgcccggaacagtatccagccgattactaccagaaaaaatgttgttcctatctgaatagcctccttccaggaaggaagaagttttccttctgccacaatgccacgatattttctattggaagaagtaagtaataaaggcaggaataataaagcatggaaaagtccccagcaaataaatgtccagttagctccatgccagaagccgcttacgagaaatataataaaagtattccgcacacttttccacttccctacccggcttccgcctaaaggaatataaatgtaatctctaaaccatgtcgttagcgaaatatgccatcttctccaaaactccgctatattacgcgagatatacggataatcgaaattcttcattaatttaatcccgagcaacttggctgtaccgatagctatatccgaataaccggaaaaatcacagtagatttgaaaggtgaagaagacagctcctaaaaatagttgtatgcttcccaactgttggtaattgctaaaaacgatatcgaccaatcggctacaattatcggctatcaccattttcttaaataacccgtacagtatctgctgcattccgtctactgcctgtccataatcgaacgtgcgaactttcaagaactgcggcaacaagttagtagccctttcgataggacctgccactaattgaggaaagaaactgataaaagcaaaaaatgccaccatatcatgtgtcggtttcattttatgctgatatatatcaatagtatagctgagagcctgaaaagtgtaaaagctgattccaacaggaagcagaatatctaatgttacccaatccaacttaatcccgaaagtctcaaataaggacacaaagttctcagaaaagaaattaaagtacttaaatatgcataacaccaacaaattcaatgtaatattagccgcacatatccatcgttgaatcaaacgacgttcttgccgctctatcaggattccgctagcataactacacaaagtagtaaatgctattaaaattagaaaacgccagtcccaccaaccataaaagatataactactgattacaacaaatatattttgtaatttcaaacgtttaaaaataaaccagtatccgataaaaaacaatggcaagaatattacatattctattgaattgaacaacataacagtttagaaggctaatttagtgtggggattataacgtcgttataatctgttctattactcgtgggaaatgttcgtactctaaagcgtgtaccttctcggcgacatccccaggagaatctgtcggaagaacgggacaggtcgcccgaaagatcgtatctccttcatcatagtgttcattaatataatgtatagtaataccgctttctttttcaccggcagcaaccacagcctggtgaacacgatctccatacatccccttcccgccgaacttcggaagaagtgcaggatgtatatttatgattttatcaggataagcatgcaaaagtaaatccggcacgcggacaaggaatcctgccagcacaataaaatcaattcgatactcctgcaaaacagccagaatttcatctccggctatccaatcttcctttgtaaacacgttacagggcactcctagacggtgtgcacgctccaaaacataggcatcacttttgttggaaagcaccaatgacaccagagcagagtcattcttttggaaataccggataatattctcggcattagagccggaaccggaagcgaaaatagcgatgtttttcttcataactctcgatttcaatgcacaaaacagtgaaaaatgtgcaaaacattgcatttatttagtcaaatatttgcgcaaaacgataaatattcattcctttgcaccgcaaatttaaagaaataaaactaattattaattaaaaacttaaagttatgtctgaaattgcatcaagagtaaaagcgattatcgttgataaattaggcgtagaggaatcagaagttacaaccgaagcaagcttcactaacgacctgggagcagattctcttgacactgtagaacttatcatggaattcgaaaaagaattcggtatctctattcctgatgaccaagcagaaaagattggtactgtaggtgatgctgtatcttatatcgaagaacacgctaagtaattatccgatttcatcaatatggaattaaaaagagtggtagtaacaggccttggcgccattactcctgttggcaatggtgtgcccgaattttgggagaatattgtgaacggggttagtggagcagggcctattactcattttgatgcgtcgctattcaagacccaattcgcatgcgaagtgaaaaacttcgatgtaacgaaatatatcgatcgtaaagaggcaaggaaaatggatctgtacactcagtacgccattgcagttgccaaagaagcggtagcagactccggtcttgatgtagaaaaagaagacttgaacaaaatcggtgttatttttggcgccggtatcggtggtatacatacatttgaagaggaagtaggcaactactacactcgtcaggaaatgggtccgaagtttaatccgttcttcatcccgaagatgatctcggatatcgctgccggacagatttctatcatgtatggcttccatggtcctaactacgcgacttgttcggcatgtgctacttctaccaatgccattgcagatgcatttaacctgattcgtctgggcaaagcaaatgtgattgtatccggtggttcggaagcggctatcttccccgcaggtgtaggcggtttcaatgctatgcatgctctgtcaacccgcaacgacgagcccgaaaaggcttcacgtccgttcagtgcaagccgtgacggcttcatcatgggcgaaggtggcggttgcttgattctggaagaattggaacatgcgaaagcccgtggtgctaaaatctatgcagaagttgccggtgtaggcatgtctgctgatgcacatcacctgacagcttctcatccggaaggtcttggagccaaacttgtgatgatgaatgcattggaagatgcggaaatggacccgaaagaagtggattatatcaatgtacacggtacatctactccggttggtgacatttcagaagcaaaagcgattaaagaagtattcggtgatcatgcgttcgagttgaacattagttcaacaaaatcaatgacaggtcacttgctgggtgctgccggtgcggtagaatcaattgcaagtatccttgccatcaagaacggcattgttcccccgactatcaaccatgaagaaggtgacgacgacgaaaatatcgactataaccttaatttcacgttcaataaagcacagaaacgcgaagttaatgttgccttgtccaacacattcggattcggcggtcataatgcgtgcgttatcttcaaaaaatacgctgagtaaaatcgtgttacgaaaccaaatagataagataaggctcttgttccacagggatagagagtcttatctttgtttttaccggatactcggtttctacccgcgtaacatccagctctatgagcaggctctcttacataaatcctcatctgtccgttcggacaaggggcgtccgttaaacaatgagcgtctggaatttttaggtgatgccattctcgacgctatcgtaggcgatatcgtctacaaacgttttgaagggaagcgggaaggtttcctgacaaacacacgttccaagattgtacaacgggagactttaaacaaacttgccgtagagatcggactggacaaacttattaaatattcaacccgttcttcttcccacaacagctatatgtacgggaatgctttcgaggcatttatcggagcgatctacctggaccagggatatgaacgctgcaaacagtttatggagcagcgaatcattaatcgttatatcgatctggataaaatctcccgtaaagaagtaaacttcaaatcaaaactgatcgaatggagccaaaagagcaaactggaggtttcttttgaactgattgagcaattccttgatcaggacagcaatcctgttttccagacagaagtacgcattgaaggacttcctgccggaaccggaaccggatattccaagaaagaatcccaacagaatgccgcccaaatggctataaagaaagtaaaggacccgactttcatggcaaccgtcaacgaaaccaaaatgcagcaatcagcaatggcagccgaacctgaacccgaaatggatgcagactctgatatcgaattgctgaatgacaatatattggaagaaaatgagttcgacaatgagattacggcagaaccgatcgtggaatctatccaaagcaaatccccatgcgacgtccctgaatcaccagatcgtgatcctcactaaccaactttagtttcccagccacttcttccaaagggatagaagcgatagtatctccttttagtgcaaccatacgcccgaattccccgttggcaatcagttccgtcgcgtgtccgcccattcgggtagagagattacggtcataaggagtaggcgaaccaccacgttgaatataccctaatacggtttcacgggtttcaatacccgtctcatactctatttcctgtgcaatgtattccgcagcacgtttacgaccgtccgtctgaatgccttcagctactactacaatagagtatggtttcccctttttcaatctttccagaatagtgtttcctatgtttttaatgctataaggtatttcaggcacaagaataacatctccccctcctgccataccggaatacaaagcaatccaacccgctttatgtcccatgacctcaatcaccatcacccttttatgagagcttgcggtagaatgcaaccggtcgatagcatctgttgcaatacttacagccgagtcgaaaccaaaagagatatccgtcccccagatatcgttgtcaatggttttaggaaccgaaacgatatttacacccatggcagcaaatttggcagccgtcttctgcgttccgtttccgccgatacagacaacacaatccaatcccatttcccgaatattctgaaggatcagtgcaggtttatcgacatccgaaataacacctccttttttaaaaggcttctcgcgggaagtccccaacatcgttccaccaagattcagcaaacccgataaagatttatctgtaaaggattctacatcttttgtgagcaacccctgaaagccgctatgaatacctaccacttccataccgtagtagttaatggcagttttgcacacgccacgaatagtggcatttataccggggcaatctccccctgatgttaagattccgattctcattgtcgcattttttagtctaaaactcggagattatatgaaagccgtcaatttttaacgattatttccgtcgtaaagatagaaaaaaaagataaataagttacttttgcacgactaaacattattatgttaaagcagaaatgaatattacaaaaattattagtaagacttttgattcccgtttaaaacagatagacctatatgctactcaggctagtgagatacagcatagtgtactaaaccgcttagtacatcaggctgctcagacagaatggggaaaaaagtacgactattcctcgatccgcagctatgaagacttcagaaaacgtgttccaatccagacttatgaggaaatcaagccgtatgtagaacgtttgcgggcaggagaacagaatctgctttggccgtcggaaatacgttggttcgccaaatcttccggaacgacaaatgataaaagtaaattcctccctgtcagtaaggaagcactgcaagacatccattacagaggaggaaaagacgctgccgcactttacttccgcatcaacccagacagccatttcttttcaggaaaaggattgatcctagggggaagccatagtccgaatctcaattctaatcatagcctggtaggagatttatctgctattttgattcaaaatgtcaatccgcttatcaattttgtccgtgtgcccagcaagaaaatcgcactaatgagcgaatgggaaaccaagatagaggcgatagccaacagtactattccggtcaacgtcacaagtttatccggcgtaccgtcgtggatgttggtgcttatcaaacggatccttgaaaaaacaggcaaacagacgttggaagaagtatggccgaatctggaagttttcttccacggaggagttgcatttactccttaccgtgagcaatacaagcaagtgattcattcaccgaagatgcactatgtagaaacctacaatgcttccgagggttatttcggcacacagaacgatctttcagatcctgcaatgttgctgatgatcgactacggaatcttctacgaatttgttccgttggaagaagttgacaaagagaatccacgtgcctattgccttgaggaagtggagcttaacaagaattacgcaatggtcatttcgacctcttgcggtttgtggaggtatatgattggggatacagtgaaatttaccggcaagaacccttataaatttgtcattaccggacgaaccaaacatttcatcaatgcttttggcgaggaactaatcgtagataatgcggaaaaaggactggcaaaggcttgttcggaaacaggggcgcaagtgagtgaatattctgccgcaccggtgtttatggacgaacatgccaaatgccgccaccaatggttaatagagttcgctaaaatgccggattccgttgagaagttcgcagcaatactggatgcaacattaaaggaagtaaactccgactatgaggcgaaacgttggaaagatattgcattgcaacccttggaagtaatcgttgcccgaccgggactattccatgactggctggcacagagagggaagttgggaggacagcacaaagtccccagactcagcaatacacgtgaatacatagagacaatgctggcgttgaattccagccctcaaatatagagaaacttatcatatagttattacaggttttcttttttgcaaagattacttgcctgagacccgggtgtcgtgtagacggaatccgggtctcagcatggatgagacttgggttcgcacaagttattctggctgtcggatagctatcgggcttttactataatccctccccccagcagcaaatcatctttatagaatgcggcagcttgtcccggagcaatagcagtcaacggttcatgaagctgtatatgcaataagtgttccggagtaacagttaccgtaccgtgattctcctgtttgcggtaccgtatcttcacgattatatcagaacaaccgagtacacggttttcgtttatcaagttccaattatccagccacatttctgttttctctagagattgaagaggggcaagtactatctcattcttttccggaaatatatctttcacaaaaacaggacgattcagatgtatccctagcccgcgtctctgtccgatggtataaaaaggatatccttcatgccaagcaataaaatgccccgtttcatcgacaaaccgcccgcgtctgactatttctgaccatttctgaccatgtgcggtaaaaagctgatcatgtttatccaaccagttttttaaaaaactccgataatccattggacagaaacaaacccctaagctgtcctttttagtagcaactttccggaagccacgttcagcagccaatgcacgggcttccactttcgtgatatcccccattggcaataacattctacggagaatatcttgtttcaatccccataaaaagaacgtctgatccttgtccgaatcagtcgcagatgtgatataataggtaccttccaacttaactttccgaacgtaatgccctgtggcaatatagaatatgcccatttcatcggcaagttccgctaacaacggccatttcaaataattattgcataaggtacagggaaccggcgtacgccccgccatatattcctgcacgaaatactcaatgatctgcttattgaatacttcacgggcatcgtacgttatatgacggattcccaaatgctccgccaaactacgggcatcttccagatattcggtcgagccatttaattcataaaaacgaaaagtcaccccgatcacctcatatccggcctccagcagtctcatagcggcaacggaactatccgtaccgccactcattcctaacaatactcgtttgttttcttctatcatgctgcaaaattaaggattttcccgtatctttgtcagttaaagcccaaagagaatgagagagaaaacaactaacggacaagtcatcatcgtttatacagagcatcctgtgtttggtatactactgatcccttacatagcagagcgactggaagatggcacgttgcagttgattgaacaggcttttcacgcttctcccgaagctattgaacaaatgaatgaagcagaaagacaagccatcgacatcgcttctcactatacagagaaatatttaatgggagcctattcccgcgaaaagacagtatcacgcttcctgcataagttatctcaagatcctgagaaagtaaagaataacattcggccatttattgaaggcaaactactcgagatgcttactctcatacgggaaaacgggttatctttttatcagaaacagcccggaagcaaagtgttgtacgcccaccatgcttatcacgtacatccacatgacgccgaagtccgctttacatttcatgtcgacagcactactttccgctatcaactgcaatgttattatgagaagcaaccattttcattggacgaccaaaaacccgttatcgcattaactgcctcaccggctactctattgttagggatgaatttatacttctttccacacatagatagtgtccggctcttacccttcaccaagaaaaaggcaattagtgcaagtgccgctcaactcgaaaagtatatcgacaatattgtcattccgattgcacgctatcacgaaatcataaccgaagggtgggatatccctgaagaaagatgtgcctgcgaagcattactgtcacttgaagacatcactcatagcgaacagttgttgcagcttggttttcgttatagagaccagctatttacatcagacaacggagcagcaatgaagaaaatcatttatcggaaagactccggtgaggtatccttcttccggcgggatattgtcgccgaaaaaaaagcgattcagcttttagaaagctccggtctgcaacgtatcggtgatatccatttcaagttatcagccggttcttctgagaaaacacttgttgagtggatcaataagcatcgggagatgttacaatcggactttcaactgaccggccatatgggaaacactccttactgcctggacgaaatacatatcgagcagagctgtgacgatgaagtagtagactggtttgagttacatatcaccgttgttgtcggcaacctgcgcattcctttctcacgcttccgcaagcatatcctcgaagaaaagagagaatatctgctgccggacggacgcatgatccttttacccgaggaatggttcagtaagtatgcgaacttgttggaaatgggagttcagacagagcagggaatacgattgaagcatacatttataggcgccgcgcaagctgccttgggaggaacaggacttaaaaagttctctggcaaaaatcagattaagaatgtttccgtccctaaagcactaaaagcaacattacgtccttaccagcagaaaggattctcatggatgatgcatctgcataaactaggattcggcggatgtctggcagacgatatgggactggggaaaactctccagacacttacgttgttacaacatatatataaatcgcccgcctcaaggaaagcagccactctcatcgtcgttcctacgtcgctgttgcacaactggcgacgggaagcgaaacgctttacaacgctttcaatgattgaatataacagtagcatcgtcgtgccccccaatcatcccgggaagttcttcggacgtttccagttgatattcacaacgtatggcatgatgcgcaacaacatcgacctgctttcttcttacaaattcgaatatatcgtactcgatgagagccaaaatattaagaacagcgaatcgctcaccttccgttctgcactccaactggaaagcaagtatcggcttgtacttacgggcacacctatcgaaaattcactgaaagatctgtgggcacaattccgtttcatccaaccggacttactgggaactgagagcgcttttcaaaaacaattcatgattccgatccgccaaggcaatacccgtgtagaagcacagttacaacaactgatatccccatttattcttcgcagaagcaaaagtgaagtggctccggaacttcccccgcttaccgaagaaacgatctattgtgacatgcccgaagaacaaaatactctttacgaacaagaaaaaaatagtttgcggaatatcctgctccaacatcctcaaagtatggataaacttcattctttcagtatcttgaacggcatcctgcggctacgccaacttgcctgtcatccgcaactcatctatccggactttaacggtgcatccggcaaagcgatacaaataatagaaatattcgacacactacggagtgaaggacataaagtactgattttctcatccttcgtcaaacatctggaagtcctcgccgaagcgtttcgcgaacggggctggaaatatgcactactgacaggagcaaccaacaaccggccgtccgaaattgcccatttcaccgagcagaaagacgtacaagccttccttatctctctgaaagccggaggcgtaggacttaatctgacgcaagccgactatgtgtttattatcgatccgtggtggaatcccgccgccgaatcgcaggctattgcccgtgcccaccgcatcggacaggacaagcaggttatcgcctatcgcttcattacccagaacagtattgaagaaaagattctctatctgcaagatgaaaaacgaaagttagcagaaacatttgttaccgacagcgaaacattgcctgcattgagcaatgaacagtgggtggatttgctaaaataaaaactgcatctttatatggactgtcttgcaagaatacttttttactttatctttgcacgcaaaatgacactgcatgaaatacaagcttatcgtgctcgaccttgacggcacactcaccaactctaaaaaagtaattactccccgcaaccgggaaatattgatacgtgtacaagaacagggcgtccgtctggttcttgcttccggtcgtccgacttatggcattgtgccgttggcaaatgaattgcgcatgaatgagttcggcggatttatcttatcctacaacggaggggaaatcatcaattgggaaacacaggaaatgatctatgagaatgtattgccgaacgatgtcgtccccgtactctatgagtgcgcccgcagccaccagttaagcatactgacttacgacggagcagaaatcgtaaccgaaaactctcaggacccgtatgttcaaaaagaggctttcctgaataaaatggcagttcgggaaacaaacgacttcctgacagacatcacgcttccggtagctaaatgcttgattgtgggagatgccgacaagcttatccccttagaagccgaactttgtcttcggttgcaaggacgtatcaacgtattccgttcagagccttactttctcgaactagtcccgcaaggaatcgacaaagccctgtctcttgccgtattattaaaagaaataggagtagaacgcaaagaaatgatagcaataggcgacggctacaatgacttgtccatgataaagtttgcaggactaggcattgccatgggcaacgcacaggaaccggtgaagaaagcggcggactatatcactctgagcaatgaagaagacggagtggcggaagcactggaacacttttactataaatttacgtagcatcatatgctcacaattcctttttcagccgtaccttcataacctttgattgtatgtcttatactctgtttcagcagtatgcagagtagctatcgtatatcaatcttaccattatatagctcgttgcactaaagtgaacagttctttctactaaagtgatgagatctttccactccagtacacaggcctcatcactcttgtggaaagaagcggatgtttattacataacgcagtgatgtcagcaagaggatctgcgaatatcgactacttaagttatcagaacagggccagcaacatataaccaaaggtcatcctactttacgtttatcaatatggttcatataaataagcaaatggtttcatttccaactatcatgagaacaatgatgagaaatacccctcaaaaagatgcattatagccatttttgagttaacgaacgtaaaaagcgaatgagaaataccaattttgaaaggtatttctcattcgtcacatatctgattataaaggaattgccaaaaaatatgagaacaatgagaacaatattaaaaaaatccgttctaggatggggatgcaaattatagatgtatgctgtctatatactcatgatacgtacagcaagaaaagctgtaccaataagcgaacacactctttacaactatataagaaagctgcgtgaagtattgtccaaagacaaagagatctcaatcacaacacagaacaatggctatgagttacatatttcaacttgaattatcgtaatatatcaaagatttattctaattttgtggttttaaatcgaataaatagcaaacgttatggaacatcaactgaccatttacaacacgttagatagaaaaaaagagttattcgtaccgctccacgcacctcatgtaggtatgtatgtgtgcggaccgactgtttacggtgatgcgcatctgggacatgcacgcccggccattactttcgacgtactcttccgttatctcactcatctaggatataaagtacgttatgtacgcaatatcactgacgtaggtcatttggaacatgatgccgacgaaggagaagacaaaattgccaagaaagcccgtctggaagaactggaaccaatggaagtcgttcaatactatctgaaccgctaccataaagcaatggaagccctcaacgtgctctctccaagtatcgaacctcatgcttcgggccatatcatcgaacaaatccaactggtacagaagattctggacgccggatatgcttacgaaagtgaaggctccgtctatttcgatgtagccaaatataacaaggatcatcactacggaaaactttccggacgcaatctggatgatgtactgaacaccacccgcgaccttgacggacaaagtgaaaagcgtaatcccgccgatttcgccctctggaaaaaggcgcagccggaacatatcatgcgctggccctctccttggagcgacggtttccccggctggcatgccgaatgtaccgctatgggacgcaaatatctgggtgagcacttcgacattcacggcggaggaatggacctgattttcccgcatcatgagtgtgaaatagcacaatcagtagcctcacaaggcgacgatatggttcactactggatgcataacaacatgattaccattaacggaacgaaaatgggtaaatcgctcggcaacttcatcacattggatgagttcttcaatggcacacataagttgctgacccaagcctatactccaatgacaatccgcttcttcatcctgcaagcccactaccgcagtacggtcgatttcagcaatgaagcactgattgcttccgaaaagggattgcaacgtctgatagaagctatcgatggattgggaaaggttacccctgcatccgcaacttcagaaggtatcaatgtaaaagagctgcgtgccaaatgctacgaagccatgaatgacgacctgaatactccaattgtcatcgcacagcttttcgaaggtgcccgcatcattaataacgtcattgccggcaatgcaacgatctccgctgaagacttgaaagagctgaaagaaactttccacttgttctgctttgacattatgggattgaaagaagaaaaaggttcttccgacagtcgtgaaaatgcctatggtaaagtggtggatatgttgctggaacagcgtatgaaagcaaaagccaacaaagactgggctacttccgacgaaatccgtaacacattaacagccctcggattcgaaataaaagatacaaaagacggttttgagtggagattgaataaataaatattaaacatcagggagataaatcccttctacagataaaaaagaccggctcattacgaaccggtctttctgtttcatagaaacatagtaactaatacccctcttaaacttcaaatcttatcatctaatcacttgttttccattaatacctcaacaggttgtccgtgctggcaggttaccgtcaattgtgtatcatttccttgtcgctccaaccggacattttccattgaattctttagcgtccaacgacctttgagtagtattttcttataaataggacggctaggttctttcgtcgtatacgccttttcttttatattcaagtttgggtcacaaacactcaaacgaactcctttaccggtttctttcgcatacatcaccattgtttcagcaggaatagaagcaatcaccttatcagttaccggctgataagcctcaaaaaccgcatacgccgtaatacctgttttcttatcataaacgacatgagccgtttgatcacgttgcaggacttcatacgcaggagttttctgaaggtcgtccaagtccgctgcagaaggctgtatcaataccatatattcataagttccgttcttcggagctttaccatgctctatccatgcagaggagaattttcctttagtgaccgcacgggttttctcatgacgtgattcttgttccgcgatctgcgaacgaactgttccgtctactacatgatagtaattgtcataaccgtcatgtaaccaatagccgtcattacccactttctgttctccgccgttgtatttcgtctggaaaagagtcgtttccgtaggataatcggcattactattcgttatgccggttcccagacaaatcatccggttgtcgaagcagaatacagatttacgggcaacaaaatcaggagtgaagttttccaaattacgctccattaacttcatagcaaacatgccattcttgccttccaaggaactgctaccggagaagttttccttggaatgagccatggtagtaccctttaacggactatccagcaactcgaagggcaaatgaatagtagtcgtacccggcaggcggttccaatcccaaccatcctgtacaaagccgcttccggtacgggaaacggggtttccttttcccatgatctgcaccgaaccataactctgataacgtccgtaacgattatcttttgtatagatttcagccccccaaacatcagtagtatatccttttagcgtcaccatccaatctgcacggcggaaaatacctgccgaaccgtaattataaacaaaaaatccttgtggagcttgtgctggcttgatgccttctttcttaaagaaacgcgcattcggagtatccctatcacgtactaaccgtagataatctgctgccagaccatgatcgaacgtattcccccgaccggacaaatcaccggctaaagctatattggcaaatgcttccacatcatcattccccatttttccaccgaaaggatgacgtccgctgataccaattccccattcataaagattacaataattgcgcatggcaataaatgcggattttatatgctggcgggcttcttccgtcagttcaaaatccgtattgttagtaaaagcaatgaattgccctattacggccagcactccggtcgtatatgccggatagaaaccaccatggtgaaaagttgtgccatctatcttaataccaccaattgttcccggtgaatagtgtaaagaagaagaaacccaacgggagaggccctccaaagcctgcgcctgctctcttgcatccgtaaacatcatagcagagataaatctcgccattaaaagcgtatgccaagtatccagcatttcatcccgttccaaaggacacggttgacgagtctcctgcaaagcagaccagaaacgtaatgtcgacaaataagcatccctgtggggatgtttatagatctcatcccgcatcaaccatgccgtcgtatatatcttacgtatctgataaccataatgatgattggttcccataccgctaccaaaggcaaatccctggtcaatagcataatcaaacaccgtgaagtagtttttctttgatgtctcgtttcgattgcaataaacgtcatacgcaaaaccggaaagcattgtttcaatatcattccacgacatctctcctatcttcttattctgttcgtccggagctacaataggtgttcccgtaaatcccgtacctgctgccgacgggcggatatccgctcttttaaatgtctcgtaagcagcatcaacttgctttttaggggcttttttcacttccagaaaatctgtcagacgttgctcgattgttttcaggtctttcgcctgtcgagcagtcaacttggatgccaatggagtatcatacgacagttgctcccacttccataccaagcaccaatgccagaggtcacggttagccaagccattattagtcggcaactgctgatccggagtggtacgaagattcatcttcttttccgggaatatcagacggtcaagaaaaatacgtcctttgcgttggggggcaactaacctgtaagctacaatatctttgtccttcttatcgccttgcatatattcgaaagaaatccagcaagcccgccaccctgctgcttgcagatgataagcaaaccaataagacacctctcccgccttattcaggaattcaaaacgaatagaatcctgctgtggcttttcattatatatccacaaggtaatgccatactgtctctccgtttttccttttaatgataaaggaggtatctgtacattcaaagttgaaccggattggaaatcccactccaagctacttttaccctctttatagaaaagagaagaaattttcgcctctccctttccggaagtcttaaatgcttcgggtacctcactactctcaaatcctatgagttgtgcgaaagccgaagaagctgttacaaacagaaacagtagtataaaacaaatatctttcttcattgtgtcattattaaatggtcaaacagtaaccaactactgcttaataaagtattttgtccgataaaatcttctccgtataccaaggatcgttgatttctttcaacatagcacccatttcacgataaagttgtgccactatttccttgttttcttccaaaggtagattgttcaactgatacgggtctttcgcgtcattgaataaaagacttttctttaactgttttgtcttacggtcgatgtacagagccaatgtatagtccgcagtcttaatacctcgtgatgaaggaaaataagtttttaccaagccgttttcgtccttttcaccatctatattctgaatgtacaaagcaccggtaggacgaacaatttcagccttttcatcgaagaaaagaggggcaaagttacgtccctgcacttctgccggaattgaatcacccaatccgcacagtccgagcacagtaggcattatgtcaggagcggaaagcagcaagtcatctacccgcggctgaatcttatccgggaaacgaaccagaaacgggatattcattgactctgagtaaggcgaattcttcggatcatccgtacgttggctacacatcgtttcaccatgatcggaggcaaaaataacgactgtattcttatccagccccatctctttcagtgtttccagaatctgtccgaaagcacggtctaccccggtcacagaagcgaaataataacgggctgattcggctttcttcattttcaggtcaacattaggacgaatcaacagactgtctaaaggttggtttttataaagatcaaagtcctgctcttcgcaatcatccaatgaacgatacggactatgaggaggattcatccctaccatgataaaaaaaggcttctttgtatcacgcacattaccttcgtttttcaaataagatacaacttttccagattcatgcagaggtgaccattctttcggatcgtgccttttaccgtccgtatcccagtaatgcggattcttatgttcatcaaacgtgccataagaataccagtagttgaaaccatgacgacgctctttcggtgtataggcatcccacacaggacgtttggattctacatattgtcccggatgttcgggatcattcggagtgggaaaatctgcatgaagtttaccgaaataagcacaatcataaccagctttgctaaatacatcaccgatgcactccgcatcctcacgcaaagaactgatcggacgtgtagagttgcaatttaaaggcaccccgctacggttcggatacataccggtcagcaacattccccgatgagggctactcaacggacagttgctttgcgcggaggtcagaaccatagactcccgtgcaaatgcatccagattgggggtatgtacgggatctccctcaaaatttactttatcccggaatccatcctgactccagaagcccattgcctgattacggtactggtccggaaatacataaataatattgggatgctccgattgttcgactacttgcttcggagccttgcaaccctgtgccgtaaacagtgtcaggcctcccaccaaaagatttataggtttcatatatatttaagttataagatgataaataataaacgataaccttattatttcttttccaaatctcttttgcgcatcagtccttccaagaagtaatagtcggcataattcaaaggaacatcaatctcctgtccgtgagggatactgcctaccgagtgcatcaggataaagtttccatttgttccaactttagcacgataagcgggtgagcccaagctttccatgatcttatcagcagtttccttgtaatgattgcccggcagataaccgtccagttcgtaaagggcagaagccgtacaagcagcggcagaagcatcacgcggttcattcgggatgttcggagcatcataatcccagtaaggaacgagatcttccggcaggttcttattcgtaaagatgaagttatatactttttgcgcctggtcgagatacttcttatctttagtgtagcggtaacaagtagtatatccgtacaaagcccaggcctgtccgcgagcccaggcggattcgtccgcatatccctgcgctgtttgtctcttacgcacttcgcctgtttcgggatcataatccacaacatgataacaactgttgtccggacggaagtgatgagccatggtcgtatccgcatgtttcactgcaatattatagaaagtagagtcaccggaaaaagcggttgcctcgaacagtaattcgagattcatcatattgtcgataatcaccggacatttccaaccgcgcgttccttgccaacctctatcggcatcccatgactgaataacacctgcattcgggcggaaacgggtagaaagagattttgccgtttcaatgattacatctttatattctttcttgtctgccatacggtatccgttcagatagctgcagccaatcatgaagcctacatcatggtgccatttcagatgcttcacagaatcaagggcctctgtatacttttcagccaacggtaaccatttctgatctccggtcaagttataagtcagccacatactgccggggaagaaaccggaacaccagtcgtcaataggtatataagatatactaccgtctttattgatagttctcggatttaggattttacctgatttctcgataatatccgtttgaatcgtgttttgtgccactgcgttgtcgatgttgtcctggataaagtctacttcaacttttttctgtccaccgcaactcgtaaagatcagaagggatagtcctaatgcgctaagaattgttttcataatacacggattattttgttaagtgattaattatctgattgcaaaaataatgcattcaacaagaatagaccgacctaaataatccaaatgagggacaaatttggtacatttgcaaggaaatatcaaaattataaagaccatgactccacaagaattcttcaaaaatgatcttttcgccgaaaacgcaggtgtagtgctgctggaagtacgtgaagggtatagtaaagccaaattagaaataaagccggagcatcttaatgcaggcgcacggactcagggaggagctatctttacgctagcagaccttgcgcttgccgcagcagccaactcacacggtacactagccttctctctctcctccaacatcacttttctacgggcaagcggaccgggcgatacactttatgccgaagcgcacgaacgctatatcggacgaagtacaggctgttaccaagtcgacgtgacaaaccagaacggggacttaattgctacttttgaatcaagcgtattcagaaaagaacagaaagtacctttcgaaattcaaaaataaaaaatcggagagccggaagaacctttacaggcaacttccggctctccgacttttctcttgatttatttaacaatagaggtcaacgggtgacgattgccggttacactattcaagaatgcttttgccgaaccaaaattcaggaataaatccaagcggacaggaaggtgatttaaatcatcagtcacaaagaaagtaatcacctctttttcttttcctttcttgtcatactcgactaacgaaaagatcaggcaacgataagtaaccccgttctcagctttcacattttcttttccacgatagataagcgtttgctcctccactttacgtccggtagccataggaaatttaattttatcccctactttataatcactaggatcataagaacgtgcctgtgccaagatgctcaacatatcgtagatacaacggctgtcactttcttccgactcggtgacggatccgtcccggtatgtacgcttctgattggcaaaacaaagaccatccttataagaaaaccaagcctcatcaaccgtataacgttttccttcctcggcacctttgcggaaataatgcggttcgagtttttcacctattacacaagtcagcgtgtcccgcattttaaagaagaaatccgcccgcttactgcccaaagccagcagattgatacgataggcaggctccgagtggtaagtagttgcgttcgttgtcaaactggccaatccggctttcacccatacaaacttccagttaaagtacaagtcgtacatcacgtgctcaccggatttgaatgcatcgttcttagcttcgcactgggcactggcaggaagaacaaagattcccattagcaatgtcgctaatccaattataatttttcgtcgaaaattagcgacgtcgctgactattcctatctctatctttctttttcttgtcttcatccggtttttgttttttaagttcgtccagtttctgcttatctagcggaattgcgtgaatatcccatgattgcttatctaagtcccagtttgccttcggctccaagatcatattgtaataatacacttcctcaggttgttctcctttttcaaagttaccagtatcccagattccatttccattccggtcgttcaccagtcgggcacaatatttaccaggattcaaaaaataaaagtctgcataccctccgtccgttaaccttctccggcgcaccactttatcttgagcatccaacaattctacaaaagcagtagagtctgctcctgtcaccagaaaggtgatactggcatattcttccagtttacgtactttgaagccctgctttattttatcggtgaacaagccatatataccatggaatgcagtcgagtctaccgagaactcatattcattacccggttcccagtcataatacaagttgaatcttttcagattcaaagaatcttgttcaaactcaaatggtatatctttccaaagcgtatccaccttttctttcagatgaatcgccgcactatcaaaacgggcaatcggttcatcaaaagtcagagatatagaaccgtacacatccattgatgaaggtgcaccgacattcaccggcaagaatttggttggttccggctcatcttcttcatctttctttttcttttttttctttttctccggttcttccttcttatatttttgcttcgaaaccagattcaacgtatccgtacgtgataccaattgatttaatgtatccgtataaagataagttaggctgatagcaagtgtatcctgcttaaaaagcaaagagtctttcacccaataatggatcgtatcgttccgcggattcttttcgataacaaaagcatccctttcatcgaaattcaaccccttcaatgtaggtaaagtatctgcctgaccggcaaaatagaacgtaaatttctgtggaacaagccgttctgatttaatcaaatattgtgagtagttgaattccttaaaggcacggagtataagatcatccggcagataatgcatatatttcctctcaacaatcgtatcgtaagtcagcgagtccacccaagccgtgtccatacggattctttcctccatacgaggaatgaccagtgaatcgttaaaagcaatgacttcacttttttggttgaaagtaaatgtctggtctgcatccattaacccataaatacgatatttgccaggagctacgccacggatagagaagcgtccccggctatcggtacgtgccacacggtcaaatggcaattttgtaaaagccgaatcgttcaggttggaatgtaatcctaccaggattccttttatcggctccagattggaagcgtcaagcaccgttccggatacctccattgtatctatttgcgtaccggtagaaaaggtgaaggtaaagttacccaacgggttaccttcgttattatcgactatcgcatccgaaaagtcaattgtataagtggtattcgctttcaatgaatcaagcaggtttacctgtatccgctttcctgaagctttaatttcgggctgttgtacctgcggtggagaaacaacaactttttctgttgctttttccaactttataaattcgtcgaacaagagagaaacttttgtcctctgattatttaaagcgccggcagcaggtgtactaccgatgaaacgaggtggcgtttcatcataagggccaccgtccggacgtccgatactggcgcaagaatatagcatgacaaccagcgttactaccggaaatgccttgcgaacgatttgctttatcttttgattctcaaattgtaacatgctgcaaaaataagtgttcttatccaataaacaccacactttctagctaatttattaaaaaacgaaagggtagcttaaggtaataaacaattccaacgcgttttttatttctttttatcgctgatataattagttttcttacctaaagcgactagctttgttagctagtctttttctctgatttttacgagatgatatcaagaagaaggagtaaagagcaggtaaaccggtagttgatatgcagaaaacagaagttggataataaactgaataatttaacgtgagatactgtttgctggaaaagcagaaacagtatctcacgtattttatttaccagcctgtattttggcctaaattaggattcttataatattctgtctgtggtataggatacagatacatcttatcatcccagttacgtgtttcaagcaactctttcttataaacaggtgaaccattttccagagtaatcttgatgcaataaatggctttggttttatcacctatcttccaacgacggatgtcccagaaccgatggtcttcaaacgccagttccacgcgtctttcgcgacggatactttcagtaaatgcatcgccatccgttgtaacagcaggcatatcagctgcactacgtacttgattcagtgctgcacgtgcagacaatggatgatcattatccgtataatcggcacccttccaggcatccatcgcttctgcatagttcagaagaatctctgcataacggaatataatgaaatgatgaggtttctttttctcgttagaaggagtaagagaaacggtctcgttcatatacttcttcaaataatagccagtggtagtcgctccggctgttccggcaccatctttaccgccttcataagactgaatagttgaattcatccatgtatctccgttgcaaagtactgttttgtaaaaccgtgggtctctgccctcatacgggttctgccccggcgcaagctgttcccagtcaaagtcttttccattagtcagctgaaaagcatccaccagattttgggtaggtacattgccggtttctcccttttcataactgataggcagattgtttgcttcaaagtcaaaactttctccatttctacgctcaaagattaattgcggagatttcaaaacatcgtttccaccgttcttatcatacagaggatcggcattcgttttcggcagactgtaccaattctcttttatgatagcataagccgcatcggcagcagctttccacttatcagcatcctgactgggattatgtaacatactcgccgcataaagaagggcacgagatttcaatgccaacgcagtacctttagtcacacgtcccgtctccgcccaaaaatcttgatgactgacgggaagtgttttagctgcatcattacattcatcgcatatatattttatcacttcgctgaaagaactcttttccacgctattgatctcatccaacgcatacgtacgtgtcaataatggaatatctccgtatcgtttggccagttcgaacaagtagaaagcccgtaacacccgcaattcttcacgatacatagtagctttggcaatatcttcttcatacgtatcattccaacggaaacgctccagcctctcttgggaatagttttcgagaaatgaattaacggaacggatagctccataacacttcgaccacatattgtcgactgcattattgggactccaggcattattataaaagtcgtgaacactgttatcactccaaatataaacagaattatccgttgcagactctctcaaagccccgtcgagcactccgagatctccgggcaactggctataaacataagtagccaagcccttgacattgctaaagtaggaataagcctcttctctgttcaaaccagtcgattcgtccagttcgagcaagctacacccagaaacggatagtagcaaacctgtatataatatgatatattttctcatggttatctcacattttagaagttaatattcaatccgaaataaacggaagtcatatccggataattgattttcagatcctcacagttcatatatttcacatgatccagcgagaaaagattattagctctcgcatatacctgaatcttctccatcttcaccttcttcgcccaagaagaaggaaaattataataaacattcaggttacgaagtttaaagtaacttccgttctccaaccattgtgtactatttctgaaattattggcattatccagcgtggtcaaacgaggaacatttgcaatatctttcgtatcttccgtccaacggattttgtcgttcagataccagtttgaaatatttgtgttgtttctcaacggccagtacacgcttgcagtattcaacatcacgctataatgccctaccccttggaagagagcgtctaccccaaaacctttatactcaaatcctaggttgataccatagtaaatctccggtatggcagtagaatatcctatcgctttctgatcattactgtcaattactttatcaccatttaaatccctatatttgacatcccccggacgtacttccgagaatttctgtacagggctgttcttaatgtcctcctcatctctaaaataaccgatcgcttcccaaccgaaacattgtccgataggataacctttcttagacagatagccatacggttgatacccctcaccattctctatgactttacttttagcataagagaaattagcaccgatgtagtagctgaagtttttatactcttttttccacatagtagagagttctgttccttttgtttccacttttcccgcattcatctggggaatggtaactccgattgcagaagatatcaacccgcttccgtcaattaaaatattagagcgcttgtcatagaaaccatcaatagaaaaagtcaaccctttgagcaaactcatatccaaaccgatattatatttatctgccacttccaagtcgagttgctccattgccagcattccctccttcaaactgcttccggcagaggtattcccagcctgaaaataataggaaccgcttcctatccaatattgcttatccatgtcataatcatagatatcatatccggaacgcccgtaagaagcgcggagtttcaaataatcaaaagcggagattcctttcatgaaattctcgttcgagagtatccaggctgcggatatggcaggatatgcacgatacttatcgttctttcccaatacgctactgccgaaacagttagcaacaacatccaccatataacgattatcaaaattataacctacggttccgatgatgtactgacggtaacggctattattagctcccgtcagagtcattgattcctggcggaacatggcactggcagtaaaatcatgtttatcccatgtccggtgataattgactttcgcttcaaagttggcatgtatatattgattagccaatcctttgttgctgatttccaattcatcgttaggatttccgtaattcgtataaaccggttctccgtcggtacctttctcaatggtctgatacataaagcttttcttggctgtttcctgataagttgcattattatcataggcaatagcaagttcagcgctcagtccgcgagtcaatacagacaggtcttgtatcaatcgcagatctgcttgcagcattcgctgattcagcttataatagcctacgtccgccagattggctatcgggtttgttttcagcacattattactaccccagagtccattctgagtctgtacagggaatgcggcagatggagtattgaatatctgttcaaacaaagtagcctccgatgtggtagggcgtttcgtttcacgcagcataccaagcatattcagtttcaatttcgttgcatctgtgatatctacatccaaattcatgcgaagattgagaaaatactttttcatctgggaattataacgatcagtgtagtcagtgtacttggaattcaacagtcccatatcattcttatagttcaagacactgaaatagcgcagcctcttacctcccccgcggaaagtaatatccagttgatgactggtcgtatgattacgcaacgcttccttctgccaatcaacattcggataaagatcgctattacctccggccaaaaaagaagcttcatccatatccggttgcaggccatcatatctcaatgcttcattccgggcttttgcatatgtataagcatcggcaaattccggttggtttacgggcagacctaaaccaaacttatagtctaccttgatctcttttttactgtacataccgcgtttggtagttatcagcaccacgccgttggcgcctctacctccccaaagagcagtagcagcaccgtctttcaatacggatattgattctatttccgaaagattgatatattcgatcgggcgggcaaaaccgtctaccacaaataatggcgtatctccattcaaggagccacgaccacgtacatttaaacgtgatttgtcggttccccaactcgtattttgcatcacagtcagtcccggcaacaggccatatattgcattgtaaggactcgtagttgcatttttatccaattcgtccgaataaatggtagataccgcctgtgtcttccgtaactcggttgtcgtctgagttcccagatcgactgtcttatcttgtccttcattattttgagctatccctgtagtggcaaacgccaacgagaaagctacgatataaagtgatttattcataatcattcttcttattattcaacgatttgattattaccaacccggattctgaatcaatccatatttcttgtttatctcatctaccggtagaggtaacaggaaatatttgtcattccacttctcaggtttcgcatactggcgtgtttccgccattgcatgagatactttataagaaaagccgctcggctcaccggccgcttttttaataatcagacgtgatagttgtccggtaaatatatctgcgcgtttccaacgtatcaaatcgaaataacgtacttcttcataaccgaattcaatggctctttcacgtaatatcgcttcgcgcaacggttttccggccggaacatctgccgccgaaatcgcaggcatacctgcacgttccctggttttgttcagataatcataggccgtattgccaaactcgtcacgaacttccgccttattcaactcattcatcgcttcagccatattcaaataaacttcgggaagacgaattaacggacaagaatagaatttaccattcacttcgtcattaaagtttcgtatgaattttctcatcgcaaaaccattgtagctcattcgcccatctttataaggtgactgggtggttccttcaaaaatctgtactttctgggcacccttaaacttatctccattcacagcaaccgtttcatacaagcggatatcccttctaggatttccatccttatcaaagaaagggaatttattatgatcgggattatcccagtcgaattccgtcccgtccttcatctgaaacatatcgacataagttaatgtaggagaagcaactccgtagcgtacttgggcaaacggaagtttccccgtagcataagtggtaaatcttctggaagaaatcagaacctctccattatgacgattgaaatatcctgccgcaaaatcatcgcgagggttacctgtattcaccagttgataaacattcgaattctttttattagcccgcataaattccaaccctgcatccagtgctttctgccacctgtctgatgaataattaccataccaggtaaggaattgagaggaagcatcaccttccaaatagggtttgtcagcattaaacaaaggactcgccacaaactgaagcactctggactttaatgctaaagcagaggccgccgtcattcgtccgtcattatccgcatctacctgccaaggtaatacagaggcagcggcatccaataacccgatgattttctgtacggtttcttctaccgtcatgcgaggaaatttcatcgcatcttctgccgtataagcatggtctatccacggcatacccccataataacggagcatttgagaataatgataggcaataattacttgtgcttccgcttttcctatcgccttttcatccgcagtcatatctgtcactctatccacattttcaatatagatataagctctccggataccataaatcggaccgacaccaatggttctattatcaacatccaaccgatatggaagatgttccagataggcatttgttccgtctaccgttcctgtatagaacttaggtgctcctttttttgtccagtcacccaaatcggtaagcatttccagcactccatatcccagacgtccttgcataggcagataatccggcagtgaatggtaagtctccgccaatgcctgctcagcatatactttcttgttaaagacagaatctatattctgctcattacttatcggcttatccaaaaacttctctccgaacttaaggtcttcgcaccctatcaatgtcaatgcaaagagagaaagacagcccatatactttttatagtttttcattgtcaacactattagaaggttagattaatacctaaattatatatcttaatgatagggtaagaatccgcattattcggattacattcagggtccatgatgtcaaacttatcaaaggtcagcagattatagcctgtcagttttatacctaactgctggatacccagttttttcaacatcttcttatctgtaaagttatatcctattgtcacattcttcagtttcaaataggaaccgtctcgtacccaaagagaagaagaacgcatattgtaaactgcgtttgtctcggtaaaccgcggtgtggtagccgtaccggctgtttccggtgtccaacgtgtatctgcgtggaactgcatcaagccacgaattttaccatttccaaaaggttctctaaaagctccatccaacaacaaggaacgctgtgcggcaccagtccagttcattgtcaggaaaaagcccttataattaatgccataattcaatccgaatgtataggctggacgagtcgggtttccaataatagtctggtcgtccgaagtaatctcttcgtcaccgttcaaatcccggtatttcacatcacccggcttcacggataccccaggatcgggcaagccagccacaagtttgccgttctctccgaaatcctcctccgtataaaaaccgtccgccacatatccgaaaagagctcctaccggatttcccgtccgccacatataaggttcattaggttctacctcgtcctggaaaataatcttattctttgagtaggaaacatttgcctgaatattatactgaacctgaccgatcctgtcattccacttcacttctacttcatatccgtgatttttcactttacccatatttacggcaggcagaatcgaggaagtcagtcccgtcaataaaggtattgtcttacgattgataagaatgtccttacgttcctcgaggaaataatccaaagagatcttcagacggctcttcaagaaatgaacgtccaatccatagttctgtttcagcgcagtttcccaagtcacgttaggattacccagacgtttttccaacgcaccctggattaacgctttactgttataaccaaaattgaagccgtatttattgttattccacgcgtctactccgctcaaattcacatcataagaatccggcaggaacaagaaacggttatttccaaggttatcatttccgaccagaccaactgaagcacggaatttcagataatcaacaactttctgttgtttcataaatgcttcctccgacaggatgtaaccgatagaaccggcaggaaatgcgccgaacctcttacccggagcaaaattctcggaaccattataaccgaagttgatttctgccatataacgggatttataatcatacgtcagacgtcctacaaaaccgatgtaagcggacggtactcccacccattgagcaggatagtattttttactctgattatataagaacaatcctccgacattatgagaaccaaacttacggttatatctcagacttgcttccagataccagtctcttgctctcgaggaagtttcgtcatattgcaagctcttattttctcctttgatcttataaacaatattcttgttgaaatccggcgaatcataaccaagcgacgggtcctccaaagaagactgatagaaaggcataaattgctccacctgccctttacgtttcttagtaaaaccataactcgtattataggcgccttttatctctgctgacagtcctttagtaataaagtccaatttctggttcaacagaagatccaaattcattgtattattaatagctgttgaataacctgtcccgtaacatttaggcaaagcactgttacccaaattaattttattatcaaaacgttcttcaggggtaactatcagcttcccgtcaattactcccgggctgctgaacggagtcgtctgattaatcaatgtccagattgaattagtcgcatcattaatcatcggttcattccggttacctacaataccaccgataccaatctttaacgtggtagtcttagtagcatcaaaatccagattggcccgataattataccttttgtatttataattattatcatatcccactccttcgaactgtttcaacaggccattctgatataagaaacctaaagatataaagtaacgtatatcctttgttcctccggaaatattcaggttgtgttgtgtctgcacagatgtcttattcagcagatatcttctccagtcgatactgggatacatgatgggatcatcattcagtctgaatcgttcaactgcataattatcaaataccaaatcattctcggtagcatttggcttgtcatttgttataatctcatttctcaaagttgcatacgtataactgtctgccatttcgagcatacgagtaggcatctgaataccaaccgaagaattcaccgagattttcgctttgccctccttaccacggcgtgtagttaccaaaattacgccatttgcacctcgaacaccgaatacagcagtggcagaagcgtctttcagtactgtcacactttctatttcattcggatccatttgataaaacgaacgttccacaccgtccaccaggatcagaggagaagaagcactttctgtcaaagaccctacaccgcgaataaacactttgggatcttcctgccccggttggccgctggtttgtacagatgagagtcccgtgatctggcctgccaacgtgttagctacactagcattaggcgaacgcaccaacgcatcattacttacggcagagatagcccctgtcaaagtctctttcttctgtgtaccataggccacaaccgtaacttcctgaagttcatttgctgtttcttttagaataatttttagttgtttacgcccgttcaacgggacctcttgaggttcatatcccatgaacgagatttgcagaacagctttttgaagattgctcacttttaaatgaaaaacaccattcatgtcggtgatggcaccgttagcagtgcctttttctttcacattcgcaccaattacttccaaattagattcatccaatacagttcccgttactgtattctgcgcccatactaagagcgaacaacacataagcattaacgtactgatgcaccttttgcatcttttcagcctcgtcagtttattcataataataaatttaagaattagaaatagaaatagaaataggtttattaaaaacactcgctgcaaattaagtaaatgatacagtttttaagatactgatatcataccaaaaaggtacaaaatagtacataacaagaaataataagtattaaaattaattgtattatccatagtatcaagctatcccatcaacaaaaaacatccaattcatcgtttcttattgactttacatacacgaaaaataaaacttcaaagatcaactcaccaagttcttccttcatcgcaaatctatgcataaacaatgcatctttattatacttcattttacagttcataaataaattaaaattgaaccatagatatacttattagattcattattctcctttactaatcaaattattccctatctttgactcccgaaattcaaacctaatacaaaaacccatgaagaaacaactgctattttgctgcttggccacgttaggactaaacgccatgcaagcacaaaacttcaatgagtggaaagatccggaagtgaattccgtaaaccgctcgacaatgcatactaattatttcgcctatgcatcggctgatgaagccaaagccggaatcaaagaaaactcaaagaattttatgaccctgaacgggctttggaaattcaattgggtgagaaacgcggatgcacgtccgactgatttcttccagactaatttcaatgacaagggctgggacaacattaaggtgcccggagtatgggagttaaacggatacggagacccgatctatgtaaacgtaggatatgcatggagaagccagttcaagaacaatcccccctttgttcccgttgaaaacaatcatgtaggttcttaccggaaagaaatcactctgcccgccgactggaaagggaaagagatttttgcccatttcggttcagtaacttctaatatgtacctttgggtaaacggacgctatgtgggatacagcgaagacagcaaattggaagctgaattcaacctgacaaactatctgaaaccaggaaaaaacatcatcgctttccaagtattccgttggtgcgacggcacttatctggaagatcaggatttctttcgctactccggtgtgggacgcgactgttatctttatgcccgcgataagaaatatatccaggatattcgtgtaactcccgacctcgacagccaatataaggacgggacattgaatatctctgtagacttgaaaggtagcggcacagtggccttaaacctgacagatgcacaagggaacagtgtagctactgccgatctgaaaggttccggcaagctgaacactactttgaatatttccaatcctgccaaatggactgccgaaacacctaatctttacacactgactgccactctgaaaaacggcaataataccgtagaagtgcttcctatcaaagtaggtttccgcaagattgaactaaagggcggacaaatacttgtaaacggccagccggtactcttcaaaggagccgaccgccacgaaatggaccctgacggtggttatgtggtttcagtggaacgtatgctccaagatatcaaagtaatgaaagaacttaatatcaatgctgtacgtacctgccactatccggacgacaaccgttggtatgacctctgcgaccaatacggtctgtacgtagtagccgaggcaaatgtggaatcccacggtatgggttacggtgacaagacactcgccaaaaacccaagttacgccaaagctcatttggaacgcaacgaacgcaatgttcaacgcggttacaatcacccttctatcatcttctggtcactcggtaacgaagccggtatgggaccgaactttgaaaaatgttatacttggattaaaaacgaagacaaatcacgtgccgtacagtatgaacaggcgaggaccagcgaatttacagacattttctgtccgatgtactacggctacgatgcgtgcgtcaagtattccgaaggcaatattcagaaaccgttgattcaatgcgaatacgctcatgctatgggtaattctcaaggcggattcaaagaatactgggatatcatccgcaaatatccgaaatatcagggtggatttatatgggacttcgtagaccagtcctgccattggaaaaataaagacggagtggatatctacggctacggaggcgacttcaacaaatatgacggctcggataataacttctgcgacaacggtctgattagtcccgaccgtgtgcccaatccgcacgcttatgaagtaggctatttctatcagaacatttggacaactgttgccgatcttgctaaaggcgaaattaatattttcaacgagaatttcttccgtgacctttccgcatattatatggaatggaaattactggcaaacggagaagtggtacagacaggcattgtttcagacctgaaagtagcgcctcagcagacggttaaagtccaattaccttttgacacaaagaatatctgcccttgcaaggagctgctgctcaacgtcagttacaagcttaaagctgccgaaactctcctgcctgccggaaccaccattgcttatgaccaactaagcatccgcgattacaaagcaccggaactgaaactggaaaaccaacagacttccaatgttgcagttatcgttcctactattcaggataacgacagaaattatctgattgttaacggtgaggacttcactctcgaatttaacaagcataacggttatctctgccgctatgacgtaaacggaatgcagctaatggaagacggcagtctcctgactcctaacttctggcgtgcaccaaccgacaatgattacggagcaggattacagaacagatatgcagcctggaagaacccggtactgaaactaacttctctgaaacatgcgattgaagacgaacaggccgtagttcgtgccgaatatgatatgcagtcaataggtggaaaattgttcttgacttatactatcaataacttgggtgcagtgaaggtgaaccagaaaatggtagctgacaagagcaagaaagtttctgaaatgttccgtttcggtatgcagttccgtatgcctcttgcatttaacgaaattgagtattacggacgtggcccggtagaaaattattcggaccgtaatcacgccgctatgctcggcaaataccgccagacggtaaaagaacaattctatccgtacatccgtccgcaggaaaccggcacaaaaacagatatccgctggtggagactgttaaatatcggtggtaacggattgcaattcgtctcagacgctccgttctctgcttccgcactgaattacacgatcgaatctctggacgacggcgccggcaaagaccagcgtcactcaccggaagtagaaaaagccaatttcactaatttctgtattgataaagcacaaacaggacttgcatgtgtcaacagttggggagctattccattggagaaatacagacttccttaccaagattatgagttaagttttattatgactcccgtctatcataaactaaagtaaaaaacatagttaaaaaacacggtatcagagaacaagaataccgaatttaaagtacttttgcagccggaaactgattctatcaaatcagtttccggccttttttccttaaaccatccctctatacaagagaataacacacgtgcaacaaaacgcatcaatttaaaaacagataaataagaagtatgaaaagtagaattgttttatttgcattttgcttagcccttctgtccagttgcggcaataagggcaatgacacgggaaaagtcccagaatatgcagtacaggaattacaaaaatcaactgcaaatctaacgacagcttatccggctactattaaaggtaaacaagacgtagaaattcgtccgcaggtttccggtttcatcactaaattatgtgttgatgaaggagctaccgtgcgcaaaggacaagtactgttcattgtcgatcctactcagtacgaagcagccgtacgcactgccaaagcagcagttgccacagccgaagcggcagtgagcactcaacaaatgacgtatgacaacaaaaaagagctgaacaagaaacaaatcatcagcgactatgatctggcaatggcagaaaactctctggcacaaaccaaggcacaactggcccaagctaaggcacaactgaccactgctcagcagaatttatcatttacacaagtcaagagtccgtcagacggtgtaatcaacaatattccttatcgtgtaggagcgcttgtcagcccttctatcgctacgcccatgactaccgtatccgagatcgatgaagtgtatgtatacttctccatgacagaaaaagaattactggctatgactaaatccggaagtaccatcaaagaagaaatcagcaaaataccaactatcaagctgcagctgattgatggctccacatacgccatggaaggtaaggtagacgctatcacaggcgttatcgaccagtctaccggttcggtaagtatccgtgctattttccccaacaaggaacatgtgttgcgcagtggaggtactgccaatgttctgattccttacaacatggaaaacgttatcagcatcccgcaatcggcaacagtggaaatccaggacaagaaattcgtttatgtgttacaaccggacaacacgttaaaatatacggaaatcggcattttcaacttggataacggaaaagaatatctggtcacttccggattgaatgcaggagataaaatcgtaatcgaaggtgtacaaaacctgaaagacggtcagaagattcaaccgatcacccccgcacaaaaagaagcgaactaccaacaacatttgaaagaccaacatgacggtaacctagccacagctttcaattaataatcagataatcgtatgaaattagatagatttattaaccgtccggtactatcaaccgttatttctatcctgatagtcatcttgggagctatcggattggcaacactgcctatcacgcagtatccggacatcgcacctcctaccgtatcggtaagagccacatatacgggtgcgagtgcatcgaccgtattgaactccgtaatcgctccgttggaagaacagatcaatggtgtagaaaacatgatgtatatgacctccaacgcctctaacactggtgccggagatatttccatttacttcaaacagggaacagatccggatatggctgccgtcaatgtgcagaatcgtgtttccatggcacaaggactactgcctgccgaagtaaccaaagtcggcgtgacaacacagaaacgtcagacttctatgctggtggtattttccctttatgacgaaagcgatacatacacagaagcatttatcgagaactacgcaaaaatcaacttgattccgcaagttcaacgcgtaccgggtgtaggtgacgcctctgtaatggggcaggactactccatgcgtatctggttgcgtccggacgtaatggcgcaatacaagttggttccgggtgatgtgtccgcagcgctggcagaacagaacgtggaagctgctccgggacaattcggtgaacgcagtaaccagactttccaatatactatccgttacaaaggtcgtctgcaacagccggaagagttcgagaatatcgtcatcaagtctttgcccgacggtgaagtgcttcgcttgaacgacatcgccgaaatccagttagaccgcttgggatacaactttaccaaccgtgtaaacggccataaagcagtaacctgtattgtttatcagatggcagggacaaacgcgacacaaaccatcagtgacattcaagcattactggatgaagcctcccaatcactgccggccggtttgaagataaacgtttccatgaatgccaacgacttcttgttcgcttcaattcatgaggtattgaaaacattgattgaggcattcatcctggtatttattgtagtatatatcttcttgcaggatttacgttctacattgattcctactattgccattccggtagctcttatcggtacattcttcatactgtctttagtgggattcagtttgaacttgctaacgttatgtgcgcttgtgctcgccattgcgattgtggtcgatgacgccattgtggttgtcgagggtgtacatgccaagttggaccagggatacacttccgcccgtctggcttctatcgacgcgatgaacgagttaggtggcgctatcgtatccattacgctagtcatgatggccgtgtttgttccggtaagcttcatgggtggaacggcaggaacattttaccgccagtttggtatgacaatggctattgccattggtctgtccgccttgaatgctttgacattaagccccgccttgtgtgctgttcttctgaaaccgcataaacaggaaggttccgaagatattcctccattgaaggagcgtatgaagacagcctataaaacggctcatacaacaatgatcaacagatacaccgaagctatcggaaagatgctgcatccgggaatcacactcacattcacacttgttgccatactgggtatgatcttcggccttttcaacatcaatccgataattactgccatcttcatacttcttagtattttggcattaatcggaatgagtacgaataaattcaagaacagattcaacgatacctatgaatctattttgaaacggtacaagaaacgcgtattgttcttcattcaaaagaagtggttgtctatgggactggtcgttgcttccattgtcttacttatgttcttcatgaacaccactccgacaggtatggtacctaatgaagacaccggtacattgatgggagctgtaaccttgccgccgggtacatcacaagaccactcggaagaaatcttggcacgtgtagacagtctgattgcctctgatcctgccgtagcttcacgcacattgatttccggtttcagtttcatcggtggacaaggtccatcctacggttctttcatcatcaagttgaaagactgggacgaccgttcgatgatacagaactctgatgttgtcgtaggttccttatatatgcgtgcacaaaaaatcattaaagaagcacaggtattgttcttcgctccaccgatgattccgggttactcggcatctacggatattgaagtgaacatgcaggacaagacgggtggagacctgaacaagttcttcgatgtggtcaacgattataccgctgcgctggaagcccgtcctgaaatcaattcggcgaagacaacattcaacccgaatttcccgcaatacatgattgatattgacgcggcggcttgtaagaaagcaggcatcagcccgagtgacatccttactaccatgcaaggatattatggtggtctgtatgcatccaacttcaaccgtttcggtaagatgtatcgtgtaatgattcagtcagacccgctatcacgtaaaaacctggaatccttgaaaaatatcaaggttcgcaacagtgccggcgaaatggctcctatctcacaattcatcactgttgataaagtatatggtccggatatcatcagccgtttcaacctttacacttccatgaaagtgatggtggctcctgccagcggttatacatccggtcaggcattgactgcgttggcagaagtagccggtcaaaatcttccggccggttatacttacgaattgggtggtatggcacgtgaagaggcacagagtagtggaagtgctaccggattgattttcatcctctgcttcgtattcgtttacctgttgctgagtgcacagtacgaaagttatatacttccgttggccgtgttgctgtccgttccgttcggtctgttaggcagcttcctgtttgtcaacggagtgagcgctatcggtaatatctcgatgttaaagatgattctcggtacgatgtccaacaatatctatatgcagattgcgttaatcatgttgatgggtctgttggcgaaaaatgcaattctgattgtagagttcgccctcgatcgtcgtaagatgggcatgagtatcacgtgggcagccgtattaggtgccggtgcccgtctccgtcctatcttaatgacatcattggcgatggtagtcggattacttccgttgatgttcgccttcggagtaggtgctcacggtaaccgtacactaggtactgcctctatcggtggtatgttaatcggtatgatttgccagattttcattgttcctgtactgttcgtaatcttccagtacttacaagagaaggtgaaaccgatggaatgggaggatattgacaacacggatgccgtaactgagattgaacaatacgctaaataatgaaattcgatatgaagaaacagattctatatatggtgtgtgcaactgctctcctgagtagctgccacatctataagtcgtatgacagacccgaagacattactacttccgggctgtatcgtgacccgattgcggagaatgatacactggtttcggatacaaccaacttcggcaatctgccgtggagagaagtcttcaccgacccgcagttacagtctctcatcgaagcgggactgaaacaaaacactgacctcttgaccgctgcccaaaatgtaaaagcagcagaagcatctctgctgtcggcacgcctggcttatgctccgtccttgggactgtctccgcaaggaacaatcagcagctttgacaagaatgcagctaccaaaacctattcattgcccgtcactgccagctggcaagtcgacttattcgggcagttgctgaactccaaacggaatgctcaggtcactttaaagcagacgaaagcttaccgtcaggctgtacaaacgcaagttatctccaacattgccaatatgtattatacactaatgatgttggaccgtcagttggaaataaccaagtctacagccgaaatcctgaaaaagaatgccgaaacaatggaagcgatgaaagacgctgccatgtacaatatcaattcaaccggtgtagaacaaagcaaggctgcttatgcccaagtgcttgccagcattccggacatcgagcagagtatccgtgaaacggaaaatgctctgtctacatttttgggtgaagctccgcacgctatcaaacgcggtacactggaagcgcaagtacttccgacagagctttctgccggtgtacctatccagttattatccaaccgtccggacgtaaaagctgcagaaatggctttggctagttgctactataatacaaactccgcacgtgccgctttctatccgcagattactcttagcggttctgccgggtggacaaacagtgccggaagtgcgattatcaatccgggcaagttactggcttctgcagtcggttctctgacacaacctctattctatcggggacaaaacatcgctcgtctgaaagctgcaaaagcacaagaagaatcagcgaaactatccttccagcaggcactattgaatgccggaagtgaggtcagcaatgcgctaagtttataccaaaaaaccagcgaaaaggtagaatctcgccggttacaagtagaatctgctaaaaaagcttcggaagatacaaaagaattgtttaacttagggacttcaacttatctggaagtactgtcggcacagcaatcttatctgagcgcgcaaatctcacaggtttccgattgcttcgatcagatgcaggccgtagtcagcctttaccaggctctaggtggtggaagagaagaataactttaaacatatactattatgattagtccgttagcttacgtagaccccgaagcaaaacttggcaagaatgtaactgtcctgccgtttgcctacattgaaaagaatgtggaaatcggagatgactgcgtcatcatgtcttatgccagtatcctgcaaggtactaaaatgggaaaaggaaacaagatacatcagaatgctgtcctgggagcggaaccgcaagatttccactacacgggagaagaaagtagcctgattatcggtgacaacaacgatatccgcgaaaatgtggtaatcagccgtgctacctttggcggcaatgctaccaagatcggtaacggaaattacctaatggataaagtacacctctgccatgacgtacaaatcaacaataactgtgtggtaggtatcggtacgactattgcaggagaatgcacactggatgactgcgtgattctaagtggaaatgtcactctgcaccaatactgccacatcggtagctggacacttgtacagagtggttgccgtatttctaaagatgtacctccgtatgtaattatgtccggaaaccccgttgcataccatggagtgaacgcggtggttctttcacaacatcacaatacatccgaaaggatcctccgtcacatcgccaatgcatacagactgatttatcaaggtaatttcagtattcaggatgctgtacagaagattgtcgaccaggtcccgatgagtgaagaaatcgagaatatcgttaacttcgtgaaggcttcggaacgaggaatcgtgaaataagcaaagttacttttcaatattgaaagggtgacgcctaataaaaaagcgtcaccctttctgtttatagtagggcgacgctctgtgagttattatttcgtttccgtttcataattattcaaactccaacgtaccgaagaagtcgggacggtggaagtccggattctctatttttatcggattccatgaaaggaagtggggggtctgcaattcgtcaccacacttgtaaaagttagcttttatctccttctcatcgagtgattcgatctgatgcttaaagaatacagcatagggaataatcaaggcaacttcccaatcagtttcttccacacgttcttcaaaaggtgtatcacccagacttgaccagcgctgcacaaggtcagtcacttccttcggagcgtgttctctaccgttgcgggcaggaccgacacctatcaggattgttccgatgcagttgcactctatattataatacaccccgtcacctgccggaatagaaaaaaattccacacaggaatcagtccatacagaaccgttgtccgttccgtatctggcacgcacactcgcttctttaactttaaaatgtaacaagatagagttcttcgtgtgagcaatgcgaaagtttactttgggtttgtagggatattcagcccaattaacacattgaaccggttgaaaatctatcttttcttcatcaaataatcggggaagcgaacaagcctccacgttagccgcactaattttctttactttcatatttctattgtttggatgatacaaatatagttactttcttctaataaggttcactgaaatgaaataaaaacaacatattttgtataaatgctaattatcaactacttaaacaatattaagaaaaagataatgtttaaccctcccctctaactggagacaaagatagaaagttctattaagcggtatttaagacaggaatttccggtattcactccgaagccggttttgtatggcgataatcatatttttctattctccactgctttatacagtttttcataggtgataaaagaacgtttctgtaatgcatcatattcctctgcatgattttgtatttttatatagataagaagatgtaatataaatatatcagattcaatctgaacggtgcttccctgaacaggttaccggctttttaaacaaatacttgtaacttgacaaatgtggttagagtacatgtattcattcctttaaataccaactgcatcataccatcttaatttatacgctatttatagtcggattacaaagaatttccctacatttgttacgttaatctatgagatctctcattaatgtcctgtctactaaagaactgcaatatttcaaagaacaatttttatattaataggacaataatgtggtattataagatatagctatattatgaagaacctaaaaagaataatttttatactacttatcatccttcctctccgtgtttttgccgactatgagcattttaaactttgggatatgtcggatggtctatccaataatacagtgaaatctatcacccaagatcatttgggattcatttggttgggaacattcgacggattgtgcaaatttgacggagtcgattttaccatcttcagacatgactcccaagatagtttgtctatcatcaataactatgtggaagtcgtagcttcgttgggagatgaactttgggtaggaaccgaacggggattgaatctttattcttataaagagaataattttcgtttgtgcgaatggattcttccgacaggtgaaagacaaaagataacggaaagcatcaaaaatatcgtagtgaatcaagagagtgtctttatattgaccttttcgcatcaactattggtgcgtaaagaaggatgtgtctttgaaccgtgtgactataaaaagaatatagaatggctgtctatttcaggctataaagagggtttattgatcggacatgccaccgatggtttgtatgttattgatcccgatgaaatgaggattcgggctcatttcccgtttgactcaaagatactgagcgactgtctgtattacagtacaaataaagatatgatttttcttggttttggtataggctatccaagtctcgcttttaggatgaacaaagagaatagccttgaaaagttggaagtcaggataccgtcaagcgtaaagacaattgtcgattataaagatgaaacattatttggaacagatggaaacgggctgatggtttttaatgaatcaggatgttccgacatttcttcgggggaaagtgatatgagtagtgatgccatttattcattgtttgtagatcggagacagaatctttggattggtacataccggggagggctgaatgcaagttcggaacattacgactggtttcagtctttctgcatacaaaataaaaaactctcgtatgatatggtaaccgctgtcgtttctcaaaaggaacggttgtatgtgggactggacggcggaggactgaatatttatgatgtaaaaaatgacaagctactgaaatatacaacgcataatagcggcatttcgggagacaatcttttgtcgttatcagtggatgatgatttcgcctggttgggaatatatggcaagggactcagtcgctattcactatccggtcacacttttaagaattatgtcttgccaccggttaaagataaagagagtgcaaatagaatatggcagataaaggacgatggtgagggtaatatttggattatagccgaagacgtttattgtttcaataaaaagagcgagacattcacggtaatcgacaatctgagtaacctgaatgctttgaatattatatttgaaaacgatgtcatttggctttgtacgatgggatatgggctttataaatttgaccggaagacgacagaacctcttgaacattactttaaagaatcagaaaaaacgcccatccccggtaatatggtacggtatatgttcattgattcccggaatcaagtatggttctcgatagaatatgccggtttatataaattagaccaaagttccggggaagtcactccgtatggagttgaaagtggcctgacggatacaaatgtagtggggatgttggaagacaagtccggttatttatgggtgagtacatataatggcttgttccgctataatcctgtcaatggaaagtttattcgttttggtaaggaagataacttgacttctacccaattcaattataacgcgtgttttcaagagggtgatacaatgtattttggaagtacgggaggattgttcagtttcaaaccggaagatattaaatatgacggtgaacaggtcaatcatgtgtattttaccaatcttgaactgttgaatcatgagaataaagttgtgagtctctatggcatacaaccggaggatatacacttgtcatatgatcagaacttctttacgattcatttctcaacgccggagttgatttcccctgacaaggtacaattctcttgttatatggagaattttgaaaacggctggtctgaaatctcccatgcccgacagatatcctatactaatattccccccggagaatattatttttatgtcaaggcttccgacaatgaagggcaatggaccgataaggcatcctgcctgaagattattatcacacccccttggtggaaaaccacttgggcattgtcgctttggggcctgctaatcctgggacttatcatttttatattctggctataccgtcatgaattgaatataaaacatttggtacatttgaatgagatagagaagaaagcggctaagaatattaacgaagcaaagctaagcttttatacgaatattacgcatgaactgcgtacgcctatttttttgataacctctcctttggaggaacttctaacgagtagggagggcagagggcctgtttcggttcctaaatctttcctggtgagtatgtacaggaacgctatgaaactgaacaagctgattagccgaattatagacttccgtaaactggagtccggaaagttgaaactcgagccgcaatcactaaatctggtcactttctgtaaagacttgacggtggattatgaagctctctgccagcagaagaatattatttttcatttcttgccgtcacggacaattattcgtgtcgagtttgatcccgaaaagatggagattcttttgtccaatctcatttccaatgcttttaaatataccccggaaggagggaaaatcgtattatctatcgatgaaacggacgaaaaagtaacgctagtggttgaagacaatggcatcggcattcaaaaagaatttcaggaagttatattcgatcgctttttccagatagaaaataccgaaatattctctacgggggatggtatcgggctttcctttgtaaagcacttggtcgaactgcatgacggaacgatacgcgtggaaagtgaactgaacaaaggggctaaatttatagttgagcttcccaaaaaagaaagagtggatgaacctgtttcttcggaagaagaaatcattattgtgccgaaatctgtaaaagagaatatgcttgtcgtgacagagtcggcctcttccccggcagccccccacaccttattaataatagatgacgagagcgagatactcgatatgctggagtgcttcttaagcagtgattttaagatattaaaggcaagtaatggtatagacggactttctttggtgcaaaccacattacccgatatcgtaatctgcgatgtgatgatgcctaaaatgaatgggacggatttcttgcaattgatgaaaggagataaaaaactggcccatattcctgtcattatgttgactgccaaaacctcggaggaggaccaaatggtggcttttgattgtggcgcagatgcttatctgaccaaaccgatttcattgaaatatctccgtaaacggatcgatcaactgttggcgcgtgtagaatcggcagagatggtgaactcattgacgaaaacggaaaagaaatattccaaagaagaacagaagttcctgttgaagtgtcgggagattattgataataacctgaataattccagttttgagataatggcttttgcggaacaaatggggatgagtcattccaccttgtaccgtaaaataaaagggatgaccggactgaccgttgttgaatttataaatgaataccgcctgttcaaagccgtccaatattttaaggaaggcgagacgaatatcggtactgtatgttccaaatgcggattcaatgatgtgaaacatttccgtgatcttttcaaacgtaagatgaatatgactcccaagcaatatgtgttgagtttatagctggatcagataatctgattcatttattcaccacgaattgccccgaatcgcccaatagccgaatttcaccctaaaaaagccgaattacttcccttttaggcaatgcatcctgcttagttttgcgacaaaacgagggtgcaatgccttgaatagttaattttaaaatcagttttatggaaaaacattttttctttatttcgttaaggaagactttattcctgacagcgacatttgttttattaataggaaacacgcaaccttcctatgcaatgctaggagtagacgaggagttgcaggttatgcagaacggcatagtcaagggacgaatcgtcgacacaaacggagaagcggtgattggagccaatgtaaagttaaaaggaagcaatcaaggaactattactgatgtggatggaaacttttctttggaaaatgtatcggaagatatcctaattgtatcttatattggctttgaagagcaagaagttgccattaaagggcggaagtatgtaaaagtcatattgaaagagaattcgcagcttcttgatgaagtcgttgtagtgggatatggcgcacagaaaaaggtgaatctgactggagcagtggcgagtcttgatgtgaaacaactagagagtcgacctattaccagtgcttcgcagagcttggcaggtaagatagcaggtgtacatattgcacaatcgtccggtatggcaggtgcagacggtgcgcagatcaccattcgcggactcggtacgttgaataatacttctcctcttatcttgattgatggggttatttctccgaatatggatgtagtaaatccagcggatattgaaagtatctctgtcttgaaagatgctgcatcggcttctatatacggttcgcaagctgcgaatggtgttgtattggtcagtacaaagaaaggaaaagcagaagggaagtcaacttttaatgtaagtacaggcctttcttggtctaagatgactgaccagagtaagccggacatggtgacggatccagaaacatttatgctcctgatgaatgaggcgcgaatcaactccggattagagtcagcttttccggatgaagtaattgaaagataccgtacacctaaattcagggatgcgtgttctaccgattggtttgatcagatttttcgcacggctactacccaggaatacaatatgagtgcaagcggcggaaataataagaccaaatattacttttctttaggctatatggaccagggatccatagcatccagtggtaactataaacggattactgcccgtctgaacctggatacttatgtacttcccaaattaaagatcggagcatctattggttatacttacggcgatcagcgcactccgaacggaagtgtagatgaggtctttgcgcttgacctgatgcgtgccaatcctctgaatccggcctataactcagacggtacgattgcgatgcccgataatacgactttgtcctatacgggacaggtgcaaggagagaatccattgaccaagatgctttacaatgagattcatcagaaaaacaataacatttacggtaatgctttcttgagttgggacatttttcctgaactgaaagtgtatgcatacttcaatgcaaatgtgcaattaagagattatagtgagtggaagggctgtccggaggttaaaaattggcgatatgaggaactgcttgcggaaggcgccgatatggaagatgtgattagtgacggttattatggaaacggaagtttgaagatgtcgtcagccagagattaccggattaacccgtatgttcagatggaatattccaagtcaattggccggcatcatatgagagccatggttgctgccagctatgaagcgaccaattacgactattttgatacatccagaggaaagtacatctccaattatgtgcatattctcgattcaggagatccttccacagtgcaaaatagcagcagtatgacacaatatgccattctttcccaattcggacgtgtgaactatgattttgcagacaagtatcttttcgaatttaatctgcgtcgtgacggttcttccagattcggttccaatttcaagtatggtatattcccttctttctctgtgggatgggtgttgacgcaggaaaatttcatgaagaagattcctacgattaactttctaaaactgcgtgcttcctggggacagctcggcaaccagtatagcagcgataatttcccttatattgccaagatcggttatgacggtaattatgtgtgggggaatgaggtggcaacaggcgttgttccgacttcttatggtaacccggatattcactgggagactaccaatgtgacgaatgtaggttttaatcttcatctgttcaattcggagctggtgctggaaggtgattactttatgcgtaagacaaaagacattttattcgatacgccattgccgtacgagacaggattcaaatcggtgttaaccaacctggcagaagtgcaaaacagcggttttgaattatcggctacttatcagaaaagattgaaagacttccatttctccattggtggtaatatgtcacatattcaaaataaggtcaatgccatagaccctggaatgaccggagagaccgaccgtcatatcagtggtaataaaattacgactcgcaataaaccgatgaattcctattatatgttgaaatggaccggcaagatttatcagactcaggaagaagtggataactctccccatgtgaaaggagcaggaccgggtgacttggtatttgaagatatcagcggtcctgaaggaaaaccggatggagtgattgatgccaatgaccgtcagatattgggaacggaatatccggcatggacatttggcgcaaatttatcatttgggtataaaggtataaatatcagtgccgattttcaggggattgcagatgcttatacctatggaacatgcgaatattatactccgacattccaaggttccaattttggccaatattggacgaaacgttggactccggaacatccgagtgagacagtcccgcgtttgtgggttgaaagcggtcctaatgttgactacgccaacagctatttcctgatggatagaacttatctgcgtctgaagaatctggttttgagctatgacctgccgttaaacatcatccgtacgctgaagatggagaaaatgagagtatatgtttccgcttccaatttattcacctggacgaagaaggattaccggggactggatccggaacgctccaacggtgcaggtgaacgaggtggtattccgcaagcgatgacagtgaaaatgggtattgatttaactttctaataactgaaacagtatgaaaaaaatatatgtattgcttttatccgctttctcgtttattatgttgagtgggtgtaatgattggattgaactggaaccgaaagatacggtggctaatgagaatttctttaaaacaaaagatgattttgaccaggctgtgacaggtttatattccatgcttcgcccgctggatgatgaagccaaagacggagcgtattttgggaatctgtattgggaagtttgtgcagacgtatgcatgtataagaatagttggacgcagccctggtttgatatatcacggggtgaattgaaatccgtgaccgacaatgtcgcatctttatatcagaaggtgtatgcggctatttcctggtcgaatacgatcattgaacagatagaggccaagcaatcggagtttcctgaggactttgtgaattatgtaaaaggacaggcgcattttgtgagggctatatgttacatccgtctgacaagtctttgggggccggttccaatgatcgatcgtctttatcttccttccgaatcaaagttgccgagaagctcggttgatgatataacgaaccagctgattatcccagatcttaaaatagctgtcagctgcctggagatgactccttataataacaaatggggacttgccaccaaacaagcagctatggggatgagagtacgtgcttatttgtataacaaggattatgaaaatacggtggaagctgcaaaggaattgatggaacttgataaaaccttagaaaattccatgttcttggacgattataaaagcatattcgccaactcgaatgaaaataacccagaaatattgttcagcctgaagtatgtagctaacggaaccaaacagggaagtacgttcaatactccttttggaagcaaaatccccggactgccgacaggaagcatgaatggttcatgggcaactgtatctatcttgccggagtttattgattcttatccattgactgacggcaagacggtggctgaaggatctatggtatatgattctcagaataagtgggccaaccgtggtccccgattcgaaagtacgttttatattggtggttattccgtcgtgaacggtatgcctttcacctctgagtatgtgtgcggcattgatgcacagtgtgcgatagattatccgttaaatatcaacaaaggatatatgaacgaagataaaaagacagaatggttgcaggaagacgagtccgatttcattattctgcgctataccgatgtgctgttgatgtatgccgaagcgaaaacgatgctcggggatatagaccagtctgtatttgatatattggacgcagtgagagaccgtgccggaatagcacatgtggctcatacaacagacccgaaggctatgatgaaaatcatccaggatgaacggaaatgggaatttgcttttgaagggttgagatactttgacattcgtcgctgggggatagctgccgatgtgattaattcgatcacttccgacgaactgtataatttcggttcgcacaaagtctttgttgcacctgccaactatctatggcctttgccgcaggaagctactgatgccaatcctaatctgctccccaataatgagggatattaatttgaaacaagaagtaaaccagtaaataataagtaaataatgaaacatattatacatatcatcgttttggctgttattacagttgtatatataagctgtgaaaaggaagattatgcccttcagcgtttgagtgctcctgcacaattgactgctagtcgcggtgatacctcagttttcctaaaatggacgaaagtggaagatgcttctttttatacattggtcagaggattaaaagtgattgcagatagtttgacggttgaatcttatgaagacgactctgctcctgatacattgactgaatatcgcatttatgctgtggacaaccaaggatggcgttcggctacttacgcggtggattcgggttatttgggaatccctgatggcattgaacctcgtgttcctgccaagttagaagcatccgatactaatattgaaggctgtttattatcctggagtgcaggacgttttgccacttcgtataaagtgtataaaaatggcacgttttataaagaggtgacaaacaagaagttcctggattatgcagcttcggtgacgggtgctgaatatactgtatattcggtcaaccacaatggtatgtcgaaaggtatttccgtgaccggcaaaaaggcttatcagtgtctcgacgattatgaaacctacgagatcggaagtgtgattgaaccttggacatttattcaagaccgtatcggatattatacagaggggaatccgcttgtaaccaatgaaaggcctttcaacggaactaaatcattaagcattaaaaaaggaaaaatagagttgatgttcgactggggcggagtgtggaatgacggttattataccataagtttcatgacttataaggcatccggcccattcaaactttattcagattttggtattgatgatacagttcagggtacaggcgaatgggtgcaatataactatcagaccggtctgctgaaagccggagataaattcaagatggtgatagattcaagagaggatgacgatattctctatgtggacaatttgtcgatagaatacgcaaaagaatagttctattttgatgatacagacatgagaatattatatcattatttcttattgaccgttttccttctattcaatgtaccggatgttggtgcatcgagacaactctttgccatacatccggtcatctacccttatccggttgagccgatggaatatcctgaatattcccggcgtccttatccggctctttcctggagtgatttcgatcatcggactcaattcgtagccgggcggaatgttccgtcaaacgaaactgaactggctgatgttccggggttggtatatcgtcctggtgcttcattcttaaagaatcaggagtttacgggaaagttgcaatatataggaaagcatggaatgtatcttcacaacataggtgggtatggaccgggaagtcctttttatggaagttttggtgaatatatcgtgccggagtggcaaacagagcaaatcagaaagcacctgggacaccggtttaccggatttgatgtaggagaacaggatggccggtttaactttacctataaacagataatggaaccgtacattccggatcgcagaaggcagtatcttgcttcccagccttattttgaccgtgtcgctgcagatttgggaaactggtgcagttcgttgagtgtactgtggtactggcattacattctaaaagaaggatatacgattcttgcaggggcggaaacacagaataagattaccaacggacaggtgcaatatatgcatctgcgcggagcgggaaagcagtacggtatcttgtggttcggtgatgtatcggtgtttgatacatggggatataagaattactcccgagacgagaaatacgagcgtgtgaataaaggaggaagtttatcgttgtttaaacgctcttattatacacagtatatgtataatgcaacgatactcagcatggagtcgggatggtgcgaaggtcattttgccactaacaagggagaattgactcctattggtaaaatgcataccgattgtgcgaactttgtagagaagtacggacagccgggctgtatggttacacaaatcgctttactcaatgatttctattccggttggatgccggcagaccatatcgcaggccgatttcaggtttggaacgggatggattatgaagcaggtgactttcttacggatgcaatgataagtttatttttcccgaattatgaacggagtggcttttttcatgatgaaacgggagcaatgtgtgcgactccttatggggagaatgccgatgttttacacagtgatgcacgtgtggaagtgatgaaacagtatcctgtcatggtggctgccggaaaccttttcagtggtggaatggagttggcggataaagtgaaagagtatgttcacaagggcggtacttttatagttacggcagaaaatgccgcacgtatttggccggaatggaaaatcggtaaaagtagaaccgttccggctggaggaatagtcaggataggagaaaatgaacttgtagaacgggggaactttgaactttatcgggcttctttgcccgatgaggctcatgttctggcaatgattggcggagagccggtagccgttaacattcccgttgggaaggggcaaattatactttcgcttacagcttatggcctgaatgctgctcccttggaatacaacaagccacctacatggatgcaaggtggtttcaacacttttctaggcaggccatatagtttactgaatcacttccggtcgatagtggatgcagtatttaaatctgtacaattgtttgaagtgggcgagggtcttggagtgatagtgaattatctggaagaaggcaaatatcggctggcgatttataacaatacactggagagcctgcctttttcaatacggtcgaagattggaaggataaaatcaatagatgaactttcgacaggagacaaactgtttcaggctcaaggatattggccgaatgggatacggggagatatgaatggaaaagataatgattcgtatatttttggaggggatatacgtttgttcgacgtatccgttgatgaagagagagtagaattggcagagaagatacagcaggcgaaacctgtgagtcaccggctgttggtatttgacgatatcttgttcaccaaagaaacaatcagatatatgcctacctttttcgattattttagcggaatatccgttgagggcgataagttgttacaggcagacagctacgctttgaaagaacagaataagtggttctgcttgcagaaattacagattactgcggatttgcggaaaggatttgcttcaggacgctggacgttcgacagtagtctgccacagtataagcaaaccttgattgagctgaaggaaatagcagataaactctcgcttctttatggagaagatgtactgtttataccgtcaacgccgataggtttttccattccctctgaattagcagatttaaattttcaactagtgaaaagtccaggacaaggtatgctcaagtcagctggcgatggttatgaattgcttgatacaccgagtttggattgggaaacagtttatggacttctgaaaaataagttacctgccgcacagcatatatccggtggacagcaatcgtctcaacagcatgtattgcccgataatagaaatcatattctggcgttggacagatactccaaagggattcttaaagatatagatgaaattgattgcttctataacgcattcggcggagtctgtgtgagcgcggaatacttggcaaattattcattagacgcacttcgtgaagagaagaagttacttgatgagcgtggtatatctatggtggttagtttcatagaagagataaaccatttcccgggcttgactttatgtgatgccgttcccgaatattatgagaaaagcatggattattataagaggatactggataaaatgggggaattacaaataggtgtggcattatttacgacgcatggtcgggttgagagtgacaagtatcctgcgcaaaaggtatatgttgggatgaaaaagacctttcgctatttgtcggaatatggtgagaaaaggggagttcggttactgctgactaacacacggttcaggattgcagatacagtagataaacagataaaaatgatacgcgagataggagaaagtaatatcgggatagctttgaatctcaaccatctttcggaaagtgagtccggcttgtatgtacggaaattccgtaaacagttgagggaacgattgggtgcagtgattctgggaggtcctgtttcctataaacattcggaatacttacctgtcccaaatagtgacaagtcggttcgggtagcgaatgatttggagggggtattgttaattgataaggtttaccctcttgatagagagcgtgtgtataaggactgccaatatatgggttggataaaggaatgagataacatctgtatttataatcggatttggatagaatattataataagaattggatatgaaacaagagaaattaattcttctttttttgctgtgtttattaagtgataccctgtgtgctaaagttcagacagacgaactatgccggcagagtatcaatttcaaccggaattggaagtatatgcaaggtgattacacaggcgctgaacggacggactatgatgatagtagttgggaaacaattggaatacctcattccttcagtattccttattttatgtcgaaagacttttatacaggctatggctggtacaggaagtcttttgaattaactgcgaaagatttgaaacaacagcttttcgtggagtttgacggagtatttcaggaagcggaagtctttgttaacggaaagaaggcaggtacacataccggtggttatacaggtttctattttgacatatcttcagcagtccgcatgggaaataatgtgattgccgtacgcgtaaataatatttggaaagccaatgtagcgcccagggcgggtgaacatgtgtttagcggaggtatatatcgtaatgtccggctggtgagaaagtcgcctgtacatattgactggtacggtatatttgcgacgacaccggatttggcagcgcatcaaggcaaatcctcggtagtcagggtttgcacggatatctgtaacaaaacgaataaaacgatggaattcaaactcttgacggaagtaaaagatgccgaaggccgaatacttgtttctgtggagaatgaggagaaagtggaagctaattctatgaagaagcttgaacaaatcactgaagcggtcaatcatcctaccttatggcatcctcgccatccttatctgtataaagtagtcagttcagtctatcaggggcaaatgttgatagaccgagtagaaacacctttcggatttcgttggtttgagtggactgccgacaaaggttttttcctgaacggagaacacttgtttttcaaaggagtaaatgtacatcaggatcaggcaggctggggagatgccgtgacggaagcagccatgcggcgagatatcctattgatgaaagaggctggctttgatctcattcgtggttcgcattatcctcatgcgcctgctttttcgcaagcttgcgatgaggaaggtatgttattctggtcggaagcgcctttttggggaatcggaggtttcagaccagatggttactgggactcaagtgcttatccggtggacaagaaagatgcacaagcattcgaagcaagcgctttgcagcagttggaggagatgatacgtattcatcgtaatcatccttctatcgtggcgtggagcatgtgtaacgaagcctttttttctgcaccggaggcgatgaaaggggtacgtcgcctattaaagagaatggttgatttgactcatcagctcgatccgtcacgtcccgcagccattggaggagcgcaacgtccgttaggggatgagagaatagataagataggtgatatcggaggatacaacggagatggagcaacgcaaccggattttcagaatccgggtattccgaatgtggtatccgaatatggcagtgtgactgccgaacgtccgggggaatataatcctggatggggcgatttgcaaatgaacgatgggtggaaaggaactccatggcgcagcgggcaagcgatatggtgtggctttgatcatggaagtattgccggcagtcaattgggaaagatgggaattgtagactatttccgtattcccaaacgctcctggtattggtatcggaacgaatatacccgggtggcaccaccggaatgggcgggagaaggcgttcctgcgcaactgcgattagaagcatctcgcactgataatatccttactgacggcacggacgatgtgcaattaatggttacggtcctgaatgcagcgggaaaacctgttagtaattcccctgcagtagaactgagattagtttccggtccgggggaatttccaacgggaaatatgattcgttttgaaccggacagtgatatccgtatcatggacgggaaagcggctattgcttttcgctcctattatgcgggaacctctgtactcgaggccacctctccgggactgaaaccggcacgtatagagattgtttttcagggaaatgaggcttataaaaaagggctgactcctgaagtgagagagcgttcttatgtacgttttgtaagagagaagaaggagaaagcggtacaggagttcggtcggaacaatcctactttttccagtagccatcacgaaaatcaagtagcgggatttgctgcggacggtaatttgcaaacctattggcaggcatccaaagatgatcccgctcctttttggatattggatacggagaaagagcttgaattgaagaatattcaggttcgatttccgaaggaaagcatctatcgctatgtccttgaagtgtcgggagataaagtacattggacagtcgtgtcagacaaacaggctaataggagaaaagagtcgcatattgctgtggattttcctgatgccggggttcgtgcacgctttgtacgtatccggtttgtgaagaagtcaccggcagttattgcagaggttacagtaaggggaattgtatgcgaataaaataaaattgttatagtaatcgttatatagcttatgttattgagaagaaattttatcaagagtatttgtgtgcttttgctttttgccgggccggttgcgggtgttgaacaaaagacagaaaccgttcccatgcgactatggtatgaccgtcccgcaacgaactggatgacctctgccttgcctattggtaatggagaattgggagctttgttctttggtggtgtagagtccgagcagatactctttaacgaaaagactttgtggacaggaagtactaccacccgtggggcttatcagaaatttggtgatgtatggattcattttgatgggcaggaagatgtccgggaatatcgtcgcgaactttctttggatgaagctataggcaaagtgagttatacgtcggctggaacgcattatttacgggagtatttcgccagtcgtcccgatgaggtaattgtgctcagactaagtacaccgaaagccgagaagaaacttaatttttccgtcagccttgccgacggacgtccgggcacccggcaagaagtcaccaaagatggtatcctgttccgtagaaaactggatttattatcttatgaagctcaattaaaggtcattaatgaaggcggcacattggtggcggatagcaataaactatgtgtgaatgcagccaattccgtccttattctattgacagcagcgaccaattatgatttatcttctgctacctatgtgggagaaacttccggacaactgcataagcgcctgacagaccggctcgcacgggcatctgcaaaaggttatgatcagctgaaatccactcacctgaatgattatcaatctcttttcaaccgcgtccggtttgatttaaagacagcagcaaagacagggggaaaaataggaatgaaaacagaaatcccctctgttcccacgaatgaactggtacgcctgcataaagaagctctttatttggatatgttgtattttcaatatggacgatacctgatgatcgcttcgtctcgtggaatgaatttgccgaataatctacaagggatatggaatggagataatgctccgccctgggaatgtgatattcatagcaacatcaatatacagatgaattattggcctgctgaggtctgtaatctttccgaatgtcacgaacctttcatccggtatattgccactgaagctcttcgcccgggtggtagctggcaacaattagcacgaagtgaaggactcagaggatggactgtaaacacacaaaacaatatattcggctacacggattggaatatcaaccgtcctgcgaatgcgtggtactgcatgcatctgtggaagcattatgcttacacacaagatatcaactatctgcgttctgtggcctatccggtcatgcgcagtacctgtgaatattggtttgacaggcttcaattaacggctgacggcgtactgcttgctccggcagagtggtcgcctgaacatggaccttgggaagatggagtggcatatgcccaacaactagtttggcaacttttcagcgaaaccatgcaggctgtacgtgtcctgcgaggagcaggcattccgttggatgcagattttgtaaggaagctgtcggagaagttgaaacgcttggacaatggtgtcacactaggtgcctgggggcaaatacgtgagtggcgggaagatagtcagaaacttgataccttgggaaatccccatcggcatctctcccaattgatagctctttatccgggtaatcagatatcttactataaagacgcaaaatatgcagatgcggcaaaaagaacgttagaatcacgtggagacttggggacggggtggagccgtgcttggaaaatcgctgcctgggcacgcttgcaggatggcgaacatgcttaccgtttgctaaaatctgctcttgacttttctacacttacagttattagcatggataacgaccaaggcggagtttatgaaaatctttttgattcgcatccacctttccaaatcgacggtaatttcggagctacggcaggcattgccgaaatgttactgcaaagtcatcagggatttatccacctgttgcctgccttaccttctgtttgggcaaatggcagtgtgacgggattacgtgcggaaggagactttacctttacaatggaatggaatgccggacggctaacacaatgtgccgttacttccggtcatggtggagaatgtcggatatattgccctgctgcccgttggttgaaagtcaaaaatagcaagggagaaaaaattacggtttcttctattgataaagatgtaatctccttttctactgtaaaaggggagacttataacttttccatattgaaataatagtctctgctaccctctttgtttcaccaggctttggaacaaagagggtagcagagactattttcgtttgtagtaaactacaacataggttgtaattgctttctttgtatccaaattgggcaagttaaaaatcaactcaaattaaaaaaaatttgctcttgattcacttccatgattagtttttatgattaattgtcatggttgttttttagggttaaaattactcttttctcaaatagaatactgatatccagtgcccttcataaaacttctgactaattttgcctctttcgaataaaaacaatatatttgccagtagtaataccttaaaaaacgaattagtgagaaaagtaatccttttatttctgctttttttaagcgtagacaccgtccatacacaaggacagaacatcactttcagccatttgaccactgatgatggactttctcagttttctgtcaacagcatgtatattgatgaacagggaattatatggatcggtacgcgcgagggactaaaccggtataacggtaatgatatcaagagtttcaaacttaaaaagaacgacccgaacagtctgttcagtaataccgtactacgcatcaccggaaatagaaatggtaaagtgtacctgctctgtaccgatggtgtggcggaattcgatctggcgactcaaaggtttaaaacattgttgcaggggaatgtagacgctatttattttaatgagaagttatatatcggaaagagggaggaagtctttgtatacaatgaaagtacgggcaacttcgaccttttctatcatctcgcaggcaaaaacatcactctatcctgcctgcacctggataaaaacaaaaatctgtggatgggaactaccagcaatggtatatactgcctgtcggaagataaaagcctttcccggcctgtcacaaaaggcaatataaccagtatctatgaggattcttccaacgaactgtggatagggagttgggaagaaggactttaccgtgtaaaaacagacggcaacattgaaaatcttcgccataatccgatgaatacgaacagtctatgctccaattttgtcagaagttgctgcgaagataactccggggatttatggataggaacattcaacggactgaaccgatatgacagagaaacaggtaagtttcacctttacaccgccaatggaaacagtcccgacgggcttacccattcttctatctggtgcatcgtaaaagacgggcagggaacaatctggctgggaacttacttcggcggagtgaattacttcaatcctgaatatgaaatctatacccgctataaagtgggagacacggagaaagcaggtttgagcagcccgattgtaggcagaatgacggaggacaaggacggtaatttatggatttgtaccgaaggcggtggtgtaaacgtatacgaccggatcaataatacataccgttggtatcgccatgaggaagggagaaacagtatttcgcacaataatgtaaaagccatctattacgaccgtgctaacgagatcatgtggataggtacccatttgggaggattaaacaagctcgacctgcgtactaaccgttttacagtctaccggatgaaggcgggagatccgacctcgttaccctcggatattgttcgcgacattataccgtataaggataagctggtagttgccacacagaaaggtgtctgcctgttcagtccggcaacaggtagttgtgagcagctttttcaagaaacaaaagaaggaagaggaattggcatggtggccagcctttgtatagacaatgacggtaccctatgggttgccgccaccggagagggtgtttactcttatcggttcgacactggcaagctgaccaattatccgcataaccctgccaatccgaacagtctcagcaacaacaacattaacaacatcatgcaggatagtaacggcaacctgtggttctccacttccggcagcgggcttgaccgttaccgcaaggaaagcgatgatttcgagaactttgatatgcagaaagacggtttatccagtgactgcatttacgaggtattcgaatcatcgatacaaaaaggacatctgttgttgattactaaccagggattttcagaatttgactatccgaaccagaagttctataattatggcacggaaaacggattcccgttgaccgccgtcaatgagaatgcgctgtttgtgacacacgacggagaagtgtttttgggtggtatccagggaatgatttctttctgggagaagaaactgcatttttctcccaaatcttacaacatacttctttcccgtttgctggtcaacggtaaggaagtaacccctggagatgaaactgggattctggaacagtcaatctgccatacaccggagattaaattgagggcgaaccaatcaatgttcagcattgagtacgccacttccaacttcatccccgccaacagggacgaaattctttatcgcctggaaggcttctccgacgaatggaatcatacgtatcgcaaacagacgcttatcacttatacgaatctgaatccgggcaagtacacacttgtcatcaaatcacagcgggacgggatcaaagaagccaaactgctgattatcgtccttccgtcctggtatgagacatggtgggcttatctgatttataccatcgtcactatcagcctgttgtggtatcttatccagaactataattcaagaatcaaactccgcgagtcattgaagtacgaaaagaagcatatcgaagacctggaagcactgaaccagtcgaaactccgcttctttacgaatatctcgcacgagttccgtacgccgttgacactaatcgtcggacaggtggagacgttgttgcaggtacagacgttcacacccaatatatataataaggtattgggaatctacaagaacagtctccagttgcgggaactgattaccgagttactcgatttccggaagcaggaacagggacacatgaaaatcaaagtgagccggcacaacctggtgaatttcctgtatgagaattatctgctctttctcgaatacgccagcagcaagcaaatcaacttcaagttcaataaacagaaagacgatattgaagtgtggtatgaccaaaagcagatgcagaaagtaatcaataacctgttatcgaatgcattaaagcatactaaagctgaggatactatctctatcaatgtatcgcaggaggaagactatgccataatcgaaataaaagacaccggctcgggcattgccgccgcggagattgataagatattcgaccgcttctaccagaccgagcacctcaactcgttgaataccggagccggtacaggtatcgggctggcactgacgaaaggtatcattgagcttcaccaaggcaccatccgcgtagaaagtgaaccgggcaaaggaagcagcttcattatcaccctcaaactggacaaaaagcacttcacggaggaacagatagcacaagaaagcacagaatcaacgatccggcaaacggaaacgattgttccttcagtggagataatacctgattcggaatggaaagaggaagaaaataaacggattgaaggcgccaagatgctgattgtggaagataatgaatctatcaagcagatgttggcaggtatcttcgaaacgttctatcaggtcagtaccgcttcggacggagaagaagctctggaaatgatacaaaaagagatgccgagcattatactgagcgatgtcgtcatgcctcgtatgtccggtacggaactttgtaaacggatcaagacggatttcaacacttgccatatcccggttgtgctgttgactgcacgcacggccatagagcacaatatcgaaggactgaagatcggtgcggacgattatatcactaaaccatttaatacaaacctgctgatttcgcgttgtaataacctcgtgaactcccgcagactgctgcaagagaaattcagtaagcagccgcagacttttgcacaaatgctggctaccaatccaatggataaagagatgctcgaccgagcaatggatattatcgaacgccacttggatgatactgatttcaatgtcaacatctttgcccgtgaaatgggtatggcccgcaccaatctgttcaccaaactgaaagcggtgacgggacaaacgccgaatgactttattctgaacattcgcctgaagaaaggggctgtcatgctacggaataaccccgaactgaatattacggagatttccgaccggattggcttctcttcttcacgctactttagtaagtgtttcaaggagatttatcatgtcagcccgttggcttaccgcaagggagaagagaaagaagaaggagacggggaagaaacggacaatttgtataatggtgataataattaatttatgtattcacctaccacctccccctacgggtactcctccttcccgaaggaggagaattaaagatactgccgattcgctcttgcagccataaaacagggccttttgtgccacaagtgtgccaccctattggcacgcttgtgccaacgcactggcacagttgtgccaaaggcttggcagggtcgtgccaatacgttggcacaaggtcagcaagataacttcgaaaaacaagcaaggttattaaggagaacaagcgtagaatcttcacacttcacatcacagagtaaagcctttcgtgtactattttgtacttcacttgtacattcctgctccttcttttcctttcaatcatttacctttgcttccaataattcatcccttaaaaatcaacttcatgagaaacgtatcacgtatacttccgctattgcccggcatcgcaatgttgtcaggatgtaataatgccgctcaaaagagtaacggacaaaacgaccagaagcctaacattatttacatattcgccgacgatcttggtatcggtgatttaagctgctacggagcaaccaaagtgagcacacccaatatcgaccgtctggccggacaaggcgtgcaattcacgaatgcttacgcaacttccgccaccagcactccttcccgtttcgggctcctcacgggtatgtatccctggcgtcaaaagaacacaggtatcgctcccggcaactcggaacttatcattgatactgcctgtgtcactatggcggatatgctgaaagatgcaggatacgccaccggtgccgttggcaagtggcatttgggactgggaccgaaaggagggacagatttcaacaaacagatcactccgaatgcacaaagtatcggcttcgattatgaatttatcattccggcaaccgtagaccgtgtgccatgcgtgtttgtggagaacggccgcgtagtgggtctcgatcctaatgacccaatcaccgtcaactatgagcataaagtaggcgactggcccaccggagaagaaaatccggaactcgtaacattaaaacccagccaagggcataacaataccattatcaacggtatcccccgcatcggttggatgacaggcggcaagtccgctctctggaaagacgaggatatagccgacatcatcacccataaagcgaagaagttcatcacttcccataaagaagaacctttcttcttgtatatgggtacgcaggatgtacacgtgccacgtatcccccacccgcgttttgcaggaaaaagcggactcggcacccgtggtgacgttatcctccaactggactggaccatcggtgaaattatgaacacgttggatagcctcaacatcgccgacaataccattctggtctttaccagcgacaacggtcccgtcatcgacgacggctatcaggaccatgcctacgagcttctcaacggtcataccccaatgggaatctaccggggagggaaatacagcgcttatgaagcgggcacacgtatcccattcattgtccgctggcctgccaaagtaaaaccgagcaagcaacagtctcttttctcacagattgatgtatacgcctcactcgcctcactgctgaatcagcctttgcgcaaaggtgcagcccccgacagccaggaacacctgaacacgttcttaggcaggaacaataccggtcgcgaatacatcgtccaacagaatcttaataatacgcttgccattgtaaaagggcagtggaaatatatcgagcccagcgatgctcccgccattgagttctggacgaaaatggaacttggcaacgaccaacagcctcagctctacgatttatcgtccgatccttcggagaaaacgaatgtggcgaaacagcatcctgacatcgtaaaagaattagctgaattattggaatctgtaaaagagaaataaatataccggaataacagaattgtatgattttataccaatcctgaatcattctatccacaggagagagcgtaaattgcatacatttgtaacagagaaacgataaagtcacattacaaccaaagtaatatactgcacaattcttctaacctttatcaacagatttatataaaaatcagactttgatcaatttacccccaaaagagagaggcccttcgagcccctctctttctttagttgatatttctcgtatcctcttatttcaatgccttcaaccaggcaggcacaaagcccaggcgtttctccagctgtgcttcgtaaagagactgcggctctaccggagttccattactttcgtccagttttacttgctcctgcacaaaattcaacggttcgccatgaaaaccgacaataacgggcggaaggaacttccaacctttaaagccgatacgccaccagtcgaatacaccggcaggagccgaattaccgcttgccgtgcgcgatctttccgaatacatattccaaatagtgaggtcatcgaggtgattgggaagttggttgtaatcacctccctgacgagactgcatgaatccacccgtacaattatcaatcagcgtagcacgcggctgcgtggcatgagactcaaagcaggcatccaatccccaatgtacccgccaaatgacagcacccatactcggttttgagactccgcaagcatgatattgtcctgccccctgctgtatgacgcctctattatctattagaggtccgttggtacgatcggtcactttgccgataaacacccgcgacgacccttgcgaccgaatggcggcatgaccacgattaccgtctatcttaatatcgtaggcggacacgttagcggaagacgtaatcgagttggcctcactaacacttataaagttcacccggcgcatccacgagtttgtcaggcgtgtcatctttatcggtttataagcaccgtcatgcgcccagtttctgtgatgctgaaaatcatcggtggcatgtcctacgaaagtcacgtcttctataccgacttcctcataatgcggatatttgtggatcgcccaaccccaacgagaatcaacttcgtgcattataggttctttaaaagtgattacattcccgctttttgccacaatttggtggaagtcctgcacctgcacacctacatttataatattctccattgttggttcgggtgcatagggagacaactcgttgcgtaccagttccgggtcattattctgtaaatacaggcatacccagtcacctttactcagcgaagccgcatcagatacttccacgctaaaagtacctttagctgcgttacccgtgatatcacagagtttcgacaacccggagttatgtttaatatcaatcattaccggcgacgaatacatggtagtaatatcatccggcaagttcggagtatccattatcagctttgttcttcctgcgccatctcccttaattacaaaatggcctgcgaatatatagatactggaacttttattatttcctttactatccaaagaatatgcttcatcaccttcctttcccaataccggcttgcccggctctattgtattgtcatcgtcattatgcaatacgtattctccttccgggaaataaatgacaatccgggcatttgcattgttgtaattcttaccgtccttacgggtcatgttattctcctgcaatatgcttatcaaggcttcacgggcagtcataccacgggtttccatacgttctttcacattgaaaactttatatcctaatgagaaagcctccggaggtgtcacttctccatgtttatatccggcatacgaataatccaacaatacattgtcatcactattcatcaggaactttttccacgcttgtgctgtgccgttattgcgggtatccagtttaagcacactcccgcttgtacgggattccaaagtgattgtattcgtctgttcatctaaaacagccgaacggtaaagagagaaatcaacagccgtttttccttccaatgacggagccggagtgtcactcaaacgttgccactgatagccattgtaagaaacttgccaacagccgtcctcccccaatgcaatttgaggagtaagaatgccttttcctgtcttgtttaaagcaggagccggattgccatgcgtatctgtcagaatgcgtgaagtaccttccaattgataattccagtaaccttctttatcaattccaagaaggggaatatctttatcgtcggcagtttgaatataaacatccgctatctgtcggttactcaattgaagtttgtaattacccttctcgtcagaggtgtagtctacaatctcggctttgccattcatcatggcctgataagccgcgatattagtattgtattgcgcagtgagttctgttaattgttccggttgctcgggaatagttgggttatttattacttcatcgtccgaacaggaagtgaaaactataacagcaaccaacatacaagttgtcgctatactatgtaaatcaagtttcatgtttttcatatttctaaagtctaataatgttataaaggcgaagaatccgttaaacccaatattagcattaatagattcttcgcctttatcaaatttaattgcagcaactattcgataactgcacctataccttgatattccggtttaagagtatattttccttcaatgtcaaccaacgtttcaaaaggagtctctttttctatggttattacattatccttaaaacctaccggcgcggttctaaaatactgccaagtcatctgagtattttcaagagaggtaaatattctattattagaaaagtctgtttcattgaaagtagctgcaccaatcattaaagtagataacattgggaaagtcccactagctgcacaatccgtatcataccagaatagattatttttcatcgtccatccttcttcagcggttactttaaaaaagccggagctatttccatgattacttagaatattaataaccgtgttattttcaatactcacattatcagagaactttgcattcgttcctttcagtaatgccacaaatagaacagagcgatcctgtgtagagcaatagaaaacattattatgaatcattatatctccataattcccattattaaaattcaagaaattaataactttagtagttgccgatggagccggcactgcaatataacaagactcaaccaacaattttgatatacctgacgatgcattattaaaataagagaacatcttgtccgccatcatctcaatcttacaatgatctaaatacagtctttctattacatctttacttgaactaggaaagttaaaccaataatttgcggttaactcatcaggagataaagtaatctccttacataacattccaattttcgactccacattttccaaagagacaatccctttggtcattacttttgaagaataattactattctttttctctcctatcagaatcaggtcactcactgcaccagtccaataagccgtagcaccttcggcaataaagtaaataccgctttcggagattgattcaccttcttttaccaatactccattcgggttatcatatttattaagtactacatcaccgatcctgatatcaaatcctgcctgatattcagcccagtaactatcactggtagtttttgcctttatctgatctgttgccgaatttactccatgagtcacttctacaataatcgtacactcgctcggagttgcaggaggtgtcacagtcactgttacttccgttgttccagccacatattccgacagttttgcattccaatcagcaggtgcttttactcttactaaatcaccttcagccaaatttactttcacagtaaaggaagacgcacctcctccggctaccaaccaaagatcatctgttacaccttcgggaacattaattgcacattccaatcctttcacaataggaatcagatactcctttccgccaaaagtaactttaaaattatctccgtcaacagttgcgttgctgataggattcgaacctgtatttataccttcagccagaccgttttccaatactttccaggttgaaccgttgtcataactcacataccaatactttttatctccatcggccggattgggtgcaatcttaaattcgggagtaatggtagcatcttccccattctccgcttgagcacgccagcctgtatctgtaccaccaataaaccaattaccatttgcaccgatctcaatagaaggatagttgcctccggtcactcccggagtcaaagtcaatgtttcgccattgcttaaggtcaaggtataagtatcaccattgatagagtaatcggtaatagtcttgttgccgtccaacagcacacggataatgttcatctcatcgttcaactgctgtacctgtgcctcaacattcgtcacacgatctttcaaggcatcaatgtctctttccaaatcgtctgtattacatgacacaaaagccaatgcaaacaaactgaataatatgaatgatttatagtatttcataatgatttcttcgcttaattattaattcaacttattcagcaaccgtcacctctaatgatttaatcagacgatatccttccttagagaatatctggaaataaacagtatatttgccggaagccagtccttttgttttaatcgtcagattatcggaagcgtcatcagtcaagactacctgtacaggtgtgggatctataatcactctggctacattcgtctgttttgccgtcaataccgctgaacctcccttcgctacatttacagaagtaatattcgatgaatcaccttgagagaaagtcatatccaaccctcccaataaagggatctcggttttcgagccgtctgtaaattcaaaggtcacgatattaccgttcaccgttacatcggcaaatatacctcccggaatctctccaatattggcaatgttgtaacgcccgtctatacgttgaggttctccaccgccaacggcataacaccagtaaccgtccgcatcaatcgagatggttggagtttgtccgtcggaaccgtctacgggaacagcaggacaaggattgccttctttatctttcaattcaacggttctaccgtcaagggtatatgtccaatttccggcttcattaatgccaagtgtaggaatatctcccgcaggctgtccgccataaacaaccaattccgtaccgtcactcagtgaaagtgtatagttacccttctcatccattgtatatccggttacaagaacaagtcctttcactgcatcttggaaagatttgatgctcgtattcaaattttcgagatcatctgtcaaagcatccaaacgagcattcagatcgtcgatgtctttacgtatatcatccttatcatcacaggaggtaaaggtaatgacaggcaataagcaaactaatagtatcaatatctttttcataattcttagttttagcgttgtgcaccatattgagtgtaaccttctttgggaatgaatgtccctgtagatttgttaaaagtagccggatcagtggtatcataaagatcaacatcattacttgtaaaaccaactgaagtatcacctatcttattttggaaaacattcagattcaatccggtttcaaaaagataagcataattgttctcggctattgttaccttagattctgccgcagatgccactcttataaggaatgccggatattcacgataagtaaaataataaatgttcttattgactgtgatatcaccaattttcgaaggataaacaatagcggaagttttcccatttgaataccctgattcaatatcaataaaggtattggaagttaatgttagtttattcacactataacttggcccttggaacaccttaaaattctccacgttagaagtggcttccggaactcctgaataatatacaatattattttcaaatcgaagttcattacagttcatattagtaaccaagtacaaattagttccagtattttcaacctttatattagtatcagtcattccaaaatagccaatactagccttatctttcacctccggcatagcaaaacccgatccaaataataagccgcttattgtacaccggtcgattataatactagcttccttagattgaacacgtacaggataagttgctgttgctgtatactttatatttgtatttttacaaatcaaggcattaccaagataaatagacttatctatgttcaggtttattgaagtaacctcatctgaattaggaataataattagattttccacaactgaggttccttggttatatgtcaatgtcaaatcgtttgcagacacgaaataaacaccaccggctatcgccccattagtagtaatctcttgtgcttcaccatacttttcttttgtaatctccagcccgcctacaataacagcctgtccttcattatacatatccagattagaagcaagtcctttcggattcttcacttttatcttgtcaactgcccagaacaagccttcctgtacctgaacagttacatcggcagtattatccgccgcggctctcgttaacgttttattctcagcagccggagcaaagatcaacaactgataattatttcctttttcatcggcaacatccagtttgttcaaagtagctctccaaccttgcggataagtaacctgcggattctcaccttcaatcttagcaggaatcaccactctttctcctttattgataatcaggaagtcctcatcatcaaatgcaagacctgttctatcaatagcacaaaccaaagttgccacgataggaagtgtatgcacagtcccatctttaagagtcacaacaaagttgctaccgtctactttggcagattcaaagatctggtcgcctaaagaactgccaccggcaatcccctctccaccgggaacattcgcccactcaccgtcaccgaaacgtatctgccaatttccattctgtacacgaaattcgggatagccctccccattcttaccgttctctcctacggctactacgccggtagaaataccgttgatataccatttcccatcatctcctatcgtaatctccggttcgttgactgttccttccttaccgatagtcaatgtcagctgggtattatcacttaaagttatgacatatttcgcagcaaccccattctctttaacagtctccactttactgactgtcttattctgaggatcaaggatgtagccgatcacagccagattatcattcaacagtttcacctgctgctcgataagcgtcaccctatctttcaggtcgtttacatcgtctttcaggtcgtctatagtacaccccgcaaccgcaaagcccatgataacgaaaagtatatacgattttatgtacttcataatctattagtatttaaagttattctgttacattgattatcaattcacaagtcttggacgccacatgtgaataatttgcgttattcatcagaaacgtagcagtatatgtacccacctgattataagtataagagtaagactccagatccagagaaatgtcttttaccttcactcccgaatccggttcgggacattccgccagattcagataatcggaaacaagccaattatacttccaaggattattggcagccgtaccgttaatagtaaatccgccgctttttatactgctcaagttccacatgccagtcactcccgttgaaacagaaccatattcaagatctttaggcatattttccggagcctgttcttcatacttcgtcttattcttcatgttcaatggagtaaagccgaaagaacttgcataagcagtagtgacacgtccgttcttccatttggtttccacacacatattcagaatattgaatgtagactgaacaatagtagcctccggatcttccggattattggcacttattgcttctttctgatctctgttcagcactaaagccagcgtcagtttcttgccaatatattctttgaccgatttactgaaactcaaagctccggctgcactggtcacaggtgcttgcggcagttgcgcacgtgtgataagttccttccagggagtattcttctccacaagtacagaatcagcctcgaaattattcttgctcattcccgggaaaaagatcgtatttcccggattatcaggatcttcttcttccgccagatacaacacatcaaactggtctttgcatgaattggctaccccgtattgagcccaaatcgaaaacttaaagtcgcatgacacaatatcttctaccgaaatctccttccggtcacgataaatatactgatgaccgatttcgccactgaagaaagaaatgtaatcaggatcaccgtgaaagagaaactcgacaggagtccccttctttacagtcaggatgttgccttcgtaccgtacattctcattggtagccacagttacactgacatcagtcagatcccggtccaactctttttcgcatgaagcaaacaagagagttcccagagttagtattaagaatttatatgttttcatcgttgtattctcttcaaaaattattaattggattaaagcggattaccaaccggggttattgcccgtaatcagtttgttgacagctttctcggcatccggaatcgggaagtactgataagcggaagatacccggaagaaaggtgcagcctgccctccctgagtccagttgtttccactctgtgccagcactgcctgctcgttcatcttatctacaaagtctccccaacgaatcaggtcgaaacgacggagatattcaaaacaaagctccattgcacgctcatcctttataatagtaagaaagtcctcacctgaagtaatctgacctgtaagatctgagattccggcacggtcacgtacctctttcaggcattcttcggccaagggcgtcggggcaccgttatattcattctccgcttccgcaatcatcagcaacacatccgagtaacgaagtatagggaaattgatagaagtacggttcttgtccttctttgcagcaggctcatattcccggcggaacttggcacaacacaaatctttcctttccttaccggcagcaaccgcttttttgtaaacatctccaatctgctccaccttactgttatattcttcaccctcattggctccctcataattatacgatctgtctccgtaccaaccggcacctttcaccagatcatacaacgccttgttttcaaaagttcttcctacaattcccaagtcagtacggtccgcaattctacgatatgtaaaaggggcaatgttccaggtgaaacgttcattatcaccattcgccacatacaaatcataaagtttcggagttgcccaaataaaaccataagaatatcccgggtcagccttgcctacaacattagataaagaagaaaagtccgaacactgaagcccgatcgtgtttccgatacggccttccgaacgcacgtctcccgttccgtctccggcaaactcaacttcccagatactttcattggcagtcgtattgtatttgtcggaacacatatcaataaacgggtcccagtaattagcggcaagcgtatgcccctgtgtccgcactttctggccgaaatagctggcacgctcgaaatacgacttgttttccgcatcggccggtttaccgtcgcgcttatgttcaccggcccagaataaatagacacgtgccaacataccccatgccgtcgacttggagatacgtcccggcttatagcttaactctctggcagagagcagccctccgtttttttcatcggcagcctcttccatttctttcacgataaacttataaatcacgttcttatccgtacgtgctatatccttattagtcaccgtcccggacgaataggtagactccgtcttgaacggcacatctccccagcactgcaccaacgtaaagtaataaaacgcacgtaagaaacgagcttccgatttgtattgcaaacggctcttatcactcattccggggacattgtctatctgttccagaaacatattggcacgctcgatgccgttatacaaattgagccagaggttggtaaccgccgcatcactggtggtagtgttattacaaatcaatcctgtattggaaatacgtccggtagaccctccataaaactccaggtcgtcaccgcctgcaagaaccatgtaatcacctccgtagaaagttgactgtcctaagttcgaatagataccggtcaggaatgattgtgcttccgcctcattctggaaatagttttccggtactattttatatggttccttctccaaaaagtcacatgacgctatcgtacatgtagccaacaaagaaaggaatgctatttttatctttttcatatcttctctatttttatatgatttcaactaaatactaaaacccaagattaattccgaagttgacagcataagccctcggataagcggaatagtcaagtcccggtgtcagggcactgttacggatagacacttcaggatcatagccggaatagccggatattgtccagagattctgtcctgctacgtaaacacgggcagtagagattccccatttcctaagcgctttcttcggcaaagtataacccagcgtcaatgtcttcagacgcaggaaagaaccatcttcgatcacacgtgaagatacaaccttgttggaacttgagttcttggctaccggtatattgcttgtcgggttttccggtgtccaacggtcggcataagtcgcatactggttcaggttacgtgaattgttgacgttttcaaagaacaagcggttcgcattcaacacatcatttccgtaagaccattggaagaagatactcaaatcaaatcctttatattcaaaatcattcgtgaaaccacctgtatggataggcaagccacgtccgatcatcgtgcggtcgttcgtgtcgattataccgtcgccattcaggtctttatatttaggcatacccggctgagtgttgttctcgctggagaagtaaggaactcccggacgcaacacatacgtatcaccggacttataaaaatcttcgtatttgtaagtaccttcatacatatagccgtacatcatacccattgaatagcctttcttcgcaatgtaagtaggctgtgaattgtacgtctggtcgaaataagcggaggtcaacaaggaagtctgattctccgccaactccaataccttattcttattaaaggcaatattgaaatttgtgctccaacggaaaccgtttctatttatatttattgtattcagggtaaattccaaaccggagttacgcactttacctacattcttcattgcgctataataaccggtagaataaggcaagcttgcatcaagaagcagatcgcgggtcgttttcatgtaccagtctacattaatgccaattcgttcgtcaaagaagcccaggtcaagaccgacgttccactgttccgtcgtttcccacttcaaatctttattcgctagcgagataggtaccataccgatgctgttctgattgttctcgaacggataaactcccgaaggaagattgttcgatgccgctttcgccattttcaacaaagcataggcttcatattcacctacacggttgttaccagtcaacccccaactggcacgcaacttaccattggaaagaatggacttatattccttcatgaagtcttcttcgctgaagttccacgccagagaagccgaagggaataacccataccgattctttttggcaaacttggaagaaccgtcgacacggaaagaagccgttgcatagtactttgacatataattatagttcacacgtccgagataagacatcatagaccatgaggacttttcagagcttgtcgtacttgggataccttcgctcatgccggccatgcccaaagattcattggggatattggtggtcttgaaagaatagtattcatagtcggaattctgcaaagtaataccaagcaacgaattaaagaaatgcttcttgttaatgttaacctgataggtcaatacattttcgttcaaccaggtcagacgttgctggcggactacctgtgcattcaccttatccgttgagatcgggctaccataacgggtctttgagttattaaacgtatcattgctacgggcatcgtacgtgtaaccgccggataccttcagcttcaatcccttgataaattcatattctacaaaaccgttcaactgaaggttattcgtatagttcttacgatattcgttcttcaatgacataatcgggttgaaacgatagtcattagtcggttctactgatgaatccagcgcattgtccattaaggtgctcaacggaacatccggttcggtaacagggcggtaaccccatacactataaaataagttattcataccgctggatgaatataaagaggtagagctaccggtctgaatggcacgtgcatagttggcagtaacactcatattcagtttgccacggcggacaacagtattcatacgagtctggaaacgtttgtagttggagttgagcacgataccgtcctgatcgaaataagaagccgacgcattgtaacgcaccccttccgttccgcccatcaggctgacgttatggctttgctgccaagctgtgcggaaaatctcgtcctgccagtcatactgcggaacaccccggtaatcttccaccgtccactgcttgccttcatgctcaatcaggtagttcttttgggtatctgccggaaacagttcattctgcaacttcacaaactcatacgcatccagcattgaaattgtattggtgacctgctgaaatccgaaacttccgtcatacttgagttgaggttttccaacctttcctttcttggtcgtgataataacgacaccattagcaccacgggcaccataaatggcagtggccgaagcatctttcaacacttcaacggattcagcgtcggaagggttaatggtagccgcaatagcaggatcttctaccggaaacccgtcaataacatataaaggtgaattatcctgggtcagagagttgttaccacggataacgatattcatcgttccgcccggcataccctcgcccgaacttacgtttactccggcaatacgtccacccaaagtctggtcgaatgaagaagcaggcgttttcagcaaatcttccatatttactttcgccactgcaccggtcaggtctttcttcttcacctcctgatagcctacgataacgacttcgtccaacgtcttcgtatcttccttcaagatgatagacatgggcttggccgtctcgaccggtaattcctgggttacataaccgataaaagagactataagaatagatttcttattaggagcattcaacgagaacttaccatcaagatctgttatcgtaccctgagtaccgcccttgatctgaatactggcacctgggaccgactccccggtttgatcaacgactgtaccccgtacaagtacttgggctactgccacagagaaagaaaataaggttaacagcatcatactgaagcctctcttccatgaaaaatttgttcggaatccggtttgcatactattagttttacatttttaattagatttgtcaatgcgcaaaattaagtactgataccctaatttacaggccaaaattattcaattatgatacaaaaacatacatataccaaagtatattcgatgtatctttgcacaaaaataacgtaatgcaagacattctacccattcacttcgctccattgcaaggctatacggaggctttttaccgtaatgcacacgctgcctgtttcggtggtatagacagttattatactccgttcgtacgactggaaaaagacggtttccggaataaagatgtccgtgagatcgctccggaaagtaatcaggtgcctcatttagttcctcaactcatagctccgtccatagaaaaggcggagacaatcttatccctttttatagaaaaaggatataaggaggcggatattaatctgggctgcccgtttccgcttctggctaaacggcacaacggttccggcattctgccttatccggacgaagtgaaaacattattgggactgactctgaaatatccgcaaatcagtttttccgtaaagatgagactgggctgggataatcccgacgaatgcctgcaactcgctcctatattaaatgacctgccgctacgccacatcacgatgcatccccgtctgggaaaacagcaatataaagggagtgtagacctcaatgggttcgacgctttcctgaatgtctgccaacatccgctcatatataatggcgacattaattgcccggatgacgttcaccgcatccggcaacaattccccgcattggcaggagtgatgatcggacgcggactgctcgcaaacccggcattagctttggagtataaggaaaaccgtacgctgacacccgacgagatgaaagagaaactgcatatcatgcatacttccgtctacaatcagtacaccgcacaactggaaggaggcgacgggcagcttctgaacaagatgaaaacgttttgggaatatctcgcaccgaatgcggacagaaaactaatgaaagcaatccataaaagcacaagcctcagcaaatataatcaggctatccaagccttttttagtcaacgataaactgattaccagttattttgtgtaattttgcgcccgtttataaacaagcacattatgaaaaaatacattttaatctcgctttgcctgctaacggccgcaggcagcttcgcacagaacaaggatttcaagtttaaattctatgggcagatccgtaccgacttctattataatagtcgtgctaacgaagaaaccgtagacggattattttatatgtaccccaaagataaggtacgcgatgaggacggaaacgacttgaactcaacaccgaacagcaacttttataccttgtattcacgcttgggcgtagatgtggccggtccgaaactgggaaccgccaaaacttccgccaaagtagaaattgattttcgcggtacaggtacctcatactcggtaatccgcctccgccatgcttatttgaatctggattggggcaagtccgccttattgctgggacagacatggcatccgctgttcggaaatgtctcccctcagattctgaatctttccgtgggagcgcctttccaaccgttcagccgtgcgccgcaaatccgctatcgctacactgaaaagaacttccaacttacgggagctgccgtatggcagtcgcaatatctgtcacaaggtcctgccggaaagagccaagaatacataaagaaaagctgtattcccgaaatctacatcggtgccgattataagaacggaggtttattggctggtgtaggaatcgaaatgttatcattgaagccacggacagaagctaccggagaaaacaataagaaatttcaagtagacgagcgtatcaccactctttcctatgaagctcacgttaaatataccaataaagactggtttgtcggagcaaaaagtgttctgggttccaatctcacacaggcttccggtctgggcggattcggagtgaagtctgtcaacgaacgtaccggagaacaaaagtacaccccgatacgcttttccagttcttggctgaacgttgtttatggacagaaatggaaaccgggcgtttttgtcggttatgctaaaaacttggggacaagtgacgaattatatgcccctgatggaaaagcacaattatatggtacaggtacaaatctcgaccaacttgtcactgccggagcagaacttacttataatgtccctcattggaaattcggtttagaatatacgctaagctctgcatggtatggttctcttaatacatccagcggtaaaatcaaagatactcatgccgtatgcaacaaccgcattgttgcagttgccatgtttatgttctaatctctcccactaatttattttaatcatatagctgccacctgtcaccgattgcagtttaacgttttggttataaacggataaggctgtgacggcaacaggtgacagcattgtgaaggcaattttgctgtcaccggagctaaaagacaacagaagtaataagattaaaagtttcgcgccttgaaacttttggtttacccatgcgaaactatagtttcatcagcttgaaactaaagtttcaaaggcttggaaccattggtttcttaccgatgaaaccaaagtttctctatggggaaactgtagtttcaagcaggtggaaccatctaaaaccgtcaatacaagaataaaatatgcagcggcttattcgcttcttacctccttaactccacttcaaaactagctccgtccttacaagtaaagcaaagtacagtctgctttttatctgctgaaaccactttacagaaaggagtctccttaatcttccaatatcctttcacagttaccgtcaccggaatctctttactttcgtcattaatccacggacgggaataaatgctgcgttccactcgttttccgtcttcatcaaaggcttcgtcactcggtccgcgatatagtgccaagtccggttgagctacggtaagcaacaacttgtcggacgattctttacgaatcatcaccagacaggaagtatccgcacgctgcaacaaatcaccgggaagtaacgtttgtggggtttcaaaaagtacataagaatataagttgtcagttaacgactgcacaatatgagcattacggtcctgcttcaaaaccttatatcccggtttcttggcaaaggccttcatggcagattcagttgtctgcggcaacacagcgtattcatagctgccgttcttgggggctttgccatgatcgactaccaatgagacccagtcccctttcgtttctttgcccgtatcctgcaaacgggaatactgcgggaagttcttctcaaatctggcggaaacgggtacataataaccggtattcaaatgatcgatccatatcttaccttcgccacggtagtcgttccaataatcatgtcccgccttatccgttactgccaactggaaaatcgttgtttccgtcgggtaagcggtattggtattttcaatatcggagcccaggcaaacaatcattccatcgatgaaatggaaggattttcgcgcccggtgagaaccgttatatttatcatgctcatgcagtttcattccaaaattgccgttttctctcttttgtgacaatccgccggcaaatgcttcatcggagtaaagcatttcttccatgccggagaatgtatctacattcatgactttagctttcaactgttccaacggaagatgtatggaagttacacccgggatacggttccaatcgaagccttcctgttgccagccgcttgttgcgggagtcaccatttgccccggagcagccgtcagaatctgtaaactgccatgcgccagataacggccataaaggttatgtcccaaataatgttccgccgcccaaagatagcgggagtgaccgcgggccaccgccgaccagttgccacgacgctgaacggatgcacagccatagcccaatgacagatttccctgtgggtcaggttcggcacggaatcctttctccacaagccgttttgccatcttccgctcctgtgcattcgatactttcggcatatattccggttcctgcccatcagcggaagtgtctgaaacaagacgcaggtaagcggacgccatttccttgtcaaactccgattttccgtccggagttcccgccatagccatcactgcataatgcatcgggactaatttcccctttccatcgggatgacggccggacatcgacaacgggaagttcaacttattacaatagaaacgcatggcaagtaatgcatttttcactgtttcgtgcgccaactcggatacggcaaactctgtatgattaaagaggtagatcatatttgttgctccgtccaaaccgccgacagcataagccgggtagtgattgcggtgatgaaaaacaccgccatcgctcttgaacgacccaaacaatccgggagccggacggcaaccgtaatcaatccaacgggagaaggatttcagatattgcagcttctccggggtatcttccatcatcaggatacttgcaatgcgaccggtagtttgcgtgttaaaggaatccatatcaattccgttgccctcaggtttgggatacacctcgttggttatcgcataccaacgcaatgtctgttcggcttccggcaactttccggcttcccgaagtacgtctttcatcaggaaataagccaggtataacccgcgaacactatatccgtaatggtgaatattcccccaacagctaccataagccactccctggtcggttatatggtcatacatcgccagaaacttctgcttcatttcttcccggatttccgactttgcagcactattattataggctacggcaatccgccgcatcaaatcaaagtaagcacgcatttctatgccgagtttagtcagcatatctttattccaatctggaataatccgttcataggcctcggcagcacgtaccatataaataggtacgcccgatacctgcccgttcttgtaagtaatctggtagaaatcatatttcttgcggatagtctccacttccttgtccgagagcttgccttttgtataattcatgtcgcggaaacgtttctccaacagttgcatttcttctttttgcttgtcgctgacaggagtcaattcgatatccggcttcagaagagagtgcttataaataaccagccagtgattttttgtttcgggattaacaaaaggtacttgcaaatcggctgtctgctgacgtgcatcaaccttcgttgcagtaatcaaatgatcgatgaaaaggcgtccttttgcatttggggcgacaatacggagttcattcataccttcttccggtgtgccttgcatatcacgctcataacaaacccatgcggcacgccaacctttaaagttgattccgaaagggaaggaggtgcatttctttccgtctttcaaaaattcaaattcaatggttgctttctgcggttcttcattgtatatccacactataaatgccgaaagatacaagtccttgcccgtagggtctttcttttcaaacttcagatctttcttgagttccaatacggcaccgggattaaacgcccattccatcgaatgttttccgtctttataatgtgtatcggagatagataattgagaccgggtggcggaaatacattccggtacttgcggatcttcaaaagagaacatccgctcgtccgtcacgacttgcgcataaagaaatgccggacataagagagatagcagagtgaatactcctaatttcgtaaaagcttgtttcatcatggatttatggtcttagttagatttatttctattaattcggttttaaaatatcgtcaccttgaaatctgtaaacagcacatgattctgtaaaaggcgcaaaccaaaatgcccgtctccctcactgccggtaatagaataacggaacagttcttcaccgttaacggaataagtggtcactcccttttgtacacgaatactaatctgataccattgattcggaacaagtaaatgcggggtatccgtatattctcgaagtaatggtttcactttatcatccgctactccgtagtacttgccgttataccggcggaaacgggtggtggaattatcatttcccccgtatccaacgtaaaaaagatctaatgtattatagtttttaaagacaccattacgccactcgctacgggcaaaaagattatcagggtttttaggatcattggcagcccaaaagcagtttaaatcactcaggcggtcatatttcccgcctttcatcaccatacaaatgcgatagtttatctcataatcacccgtcaggcgttgctgataccacatcgttagcccaccgggcacgattagttctactgtatccgcacgctctatcatctgcaaggcacgggattcatcttcaatcttccactgttgcacagaggtgttttcatgttgtgcatacagcatgacactattcaaaagaaaaaaagtaatcagacagcagcttgtagagaatcgtttcatcatcaatggcattagtttaaagacattcttttcggatacaaagaaacccctcttttttcaaaaagaggggttcaaattgtacaaaatatctcaaataatgtattgacagagaatttgtattaccagtatcttatcgttttttcagcatcgggttccaaataccagcctttgttgagtgtaccattattctttgcccattcgctaaacttcgggtatgcttcttcgaaagctttatgctcaacagcatgtcttgtgccggcaggaactttgataccccagacaaaaccgttcttattgcaataggggatattttcattgatagcctcatcgccacttacaagcgctgcatcttttgcataactttctttataagcagaagtcggctgacatcctctcatgtgtatttcttttccctcatgagtataaatgaagaagttctgtctctgagtatccaggataagatctctgaacactttaagctgagcagtcctatccgctccttccaaattatccttaccgatcaatcgaacctctgcacgcaacataggcaatccttcacgtacttttcccggcgttgtctggaacaaatcgtcattgttatcttttaaactactcaggccgtccaatgtgataaccgttccttcagtcggttttgtatctacatccaatttagcaaatcggcttacagttgctacatcactgtcccatctccaacctgaagcactaactgacacactaggttgtgcagaaagttctacgccgttccccaagtctctcattgttccctgaccacctttcaacaccagttttgcagtaatccggtcaatatacttgttatccaagttttctaatataacgcccaatctggtcgggtatgttcctcctacggcgcggacatccaaagtaagcagcaactcttctttactaccttgctttgccatttgttcttcgtcctgacattcagttaccttcatgtcatattcaaaaacaacatcgttgaaatccttgtcataccaggtcgattgtttaggccagccgtcttcaaacatagcgacacccgtactgtgatagaaaagatagcctgcatccgtctcgtctgtcggtttcaccgcatcttctggaagcgaaagcttaaccgctgctatacggctagtctcataagcaaaatcaccggtcggataagtttcactacgagtggcaggagataaagtaaaagcagtctttttcactgcgcccgatactgtgttgtactccatatataccttttcagtatgaatagggacattcaaggtaattgtacgcggagccccctcttttacaagtatattgcctgcgagcaggtgctctcccttttcatcagcatacactttaaccaaaggagaacttgctgccggttctgtccccgtcccttcttttccattcccaaactctgtgtcggagcaagaagaagccacgactaatgtccccacaaggacataaattaactttttaatcttcatcattattccagtttttaaattattgtttgtttttgtttcccacgaaaccatagctttcgcaagcgtaaataaggccccattagttaacttatcaaaaatatatttaacgctttatagtctttttgctcatctcactaactttttcttgccttttcaccgaagattatccggaagtctcgaaatatactccttagtgcctgttcacgggcaatggataatatatacaacttatttgttatctttgcgagtaacagaacattcaatacaacaaatataacgtatttgtttgaaatatacaagttttcaactaaatatcttgaggggaaatggatcaagtattgtacggtatagattatatagaatattatttctattggatatattataagtttattggctatcctttaattataagaatatgctcaatcgctgtaatgttctgtatcattatgtacctcttcttgttatttcatatcacatacggcatattcaagagaaggaaagaaaagaagaaatataataaggctttcgataagtactatgaagaaatgaaagccatctcgctagacccgaatgcactgccggaagaagaaatagccgacagattgaaatatgatacgagaaaacggcccagacccaacgaactgcgtatcatcacccaactgctgacagaaatcaagagtgtccatgaagatgaaattaatgaactcaattaccaaaccatacaaaccgtattccagataacccgcttcctggaacgtgaacttcaattcggttccaaaagatcaaagattcaagcattgaaactgattcagtctatcaacggatacgcttccgaggctgtattggtacgtttcctctatcaccgcgaattagagttgaggaactctgcacgatatacttatatgtggttaagccagggaaacccgttccgtttcttcgacgaagatattgccatgaagttgagacaatgggacatgatggagttgcacgctattctggagcaccgtaagaaagtgggatataataccccaagtttcatcaaatgggtgaacacgtcagctgaggagaatgttaagatattctttattaatgaaatcaggctatataatgaaaccgaaagcgcccctatcttagccaaacagattaatgcacgttccacagatatccgtggagaagccattaaaacactgggcaaattaaaatacaaggaaattgaacctaaactgatagaaatgtatcatgtacaaccggaagaggtcaaacgaaatataatcgaagctatctcagacctaaagaccgacaaagccttgggatttctttacaatgcatacgatgaagctgataactggggaacgaaacgagctatcctcaaagccctctatgcatatagcgccatgggacggaaaacattcgatcaattggagagaaaagcagattcgcatacagcgatactattcgctcataccaagcatccattaatcaatcagttaagctaaagaatatgagagatatattatttacattcttcaattatttcgtattcttttatacgagtatgctggcaatattctttgtgatgtttgccttcctctcctttatttcactgaaacggagaaaggattattacgtagaaagctatgtccggaagaccatcaaagaatctccttatacacccggaatctcggtaattgctcccgccttcaacgaggagaaaaccattatcgacaatgtaagttccatgcttgcactggagtatccgctatttgaagtaattatcgtgaatgacggaagtacggacagtacgttgcagaaaatgatagagtactatgaattggtggaagtaccctatgcttatatcgaacgaatcaaaaccaagcctttcaaaagacttttaaaatcaaccaattctcaatatagccgccttatcgttgttgacaaagaaaatggaggaaccaaagcggatgcttctaatgcaggtatcaatgcctcttcctatccttactttatctgtacggatgtggactgtatattggaaaagtatgctctttaccgttgtatctctcccattatttcctccgataaacaggttatcgccgtcagcggtacaatgctcatggccaatggatgtgaggtaaaagacggccagatcgttgtggtcagaactccccataccccgatcccgcttctccagaatctggaatatatgcgttcttacctgattggaaaaatgggctggtcggctatcaacggaatgccgaatgtttccggtggattcggactttttgaccgtgacgtggccattgccgccggaggatatgacagtacttcttttgcagaagacatggatttgattacacgtatggtaggatatatgtgtgacttctcccgcccttacaagattgtacaaattcccgacacttgctgctggacggaaggaccttctaacctggctatgctctatcgccaacgtacccgctgggcacgcggactgttccaaacgctcagtatccaccacaagatgatctttaaaaagacatataaacaaatgggtatgttgacattgccttatatgttcatcttcgagtttctggcccccatcatcgagcttacaggttttatcgtattcctctacctggccttcacgggagccgtcaactggaacacggcctggatgatctatctgacaatctacacgttctgccagttcttgtccattgtcgttatcacttacgactattacgtcggaatgctttataaaagaggatatgagtatctatggattatcatcgcctccatattggaacctattttctatcatccgatcatcactttctgctcattgagaggatatctaagttatctgaccaacagagacttcaaatggaagaaaatggaacggacaggattcaataagaaaagagaaaaggcggatgatactaacagccccgttacgcccgaaccggcaactgtttaatttagaaagaataataaagacaagatatattattaaagcaaaatataatgaacagagagtttctccataaaatcaccctattaggctgtctgcttttgctgattacctcatcagtaggtagcgacaaaggattccagacgccggagcaatatgcccagattgtacaagagcattttgcgaatgaagaatgggatgcggggaaagcattgctggacgaaggacttcagaaatatcccggtgtctccgatctggaatggctcatgggtaaatactggtttcacgaaaagaactatgacgagtcacgctatcatcttgtcaaggcaattgaggataattacaacaatgtcaatgccaagcatctgctggtggatgtagaagatattactgagaactattccagcgctatctgttacgttaacgaacttctggaagtaaacccatattggagaggcctgtggcgcaggaagatcgaactgtaccgtaaacaaaacaataacgtcgaagccgaccgcctgctgaaacgtatcaaccagatttatccgaatgacaccattctgcgaaaggattatatttacagtatggaagtaggttaccaacaaatgaaaaaagacggcaaccgaaaggaagcgatcgaaaagctgaccgaactgattaaagtatctccgcaaaatgaagaatattacctggacattattaatctgcacctgcaggaaggtaaccgggaagccgctttaggctggtcttccaatgggttggcggcaatccccggaagtcccgctctgattaccaaaagggccagtatcctcgctgaattagcgcgttatccggaaacactagtctttatacgcgagcaaatgaggaaatacggcagtccggctatacggcgtatgtacaacgacttgctaatggaagcggcgcgggcagaaaagcaacgcgacccttatgtactatatggcatggcctacgaaggcggcaacaagaacaaagaagcattagactatctgctcaatacttccgtcaccagaggatataccgatgatgcgcttttctatatcagggaagccaagaagcaatatggcaacacggacaagggaatcatgtacaaggagtatatgctttaccggcaaatgaacgaggatgatctcgcctattctactttgaagaagatgtatgagatgtatcccgacgattacgatatcacgctggccatgagtgcacagcacatgaagaaagccgagaagttaatggaactggggttatattcggaagcattgcctcacgtactgttcgtttcccaaaagcatatcgacaatgaagtgaacggtgccgcatgggaaaagacattgagttgttacatcaacatgaagcgttacaacgaggcactcgctacactggatacgatcacactccacttcccggactatgagaacggaacactgaaaagagcgtttattctcgataaaatggacaaaaccgaagaagcactgcaactataccagtctgctatcgagcagagtgatgaggatatgcgtatcttctatgtcatcggttacgaggaactggcagtgccttatatcaagaagtgcatggaagcgggagccacacggaaggcttacgaagaagcggtcaaattagtgaacctgaatccttcaagtgacctcggattacggtatgccatcaattcatccggtttacttggaaggttcgatgaattcgagaaatatacggagcaaggaatcaatttttatccggaagaaccgttctatcaggccaagagggctaccgtgctggaacgcggcaagagatatgaagcctcactcgaattcctgaaaccgatactcaacaagtatccgagcaacaaagagattatcggcgcattctcacaaagcagcgaataccgcgccttgcaattgacgaaagcgaaagatccgaaacaagcccttgctgtgctcgatacggccctgctttatgacagccagaacaaatctttaaaatacaccaaaggagtagtatacgaagcgaacagacaagctgactcagcctattattatcagaagttctatgaaccttcaatcatggaatatcgctcttttcaacggcacttatcgggccttagaagcatgatgctcaagaatgagatagccctgacttatctgcgtgcccgttacggggaagaagatatcatcacatccgtcgccacagccgaatatacccgcaagacgcaaaagaatacctataccggacgcttcaactatgccggacgaagcggttcggcaagtgacagcatggaagctgaagaacagacaccgggaggggttggtatccaagtacaaggcgaatggacacatcatttctcaccgaagtggagcactacagtgaatgccgcccttgctacgaaatatttcccggacatcactgccgatgttgctgtacggcattacatgaagaatgattgggaattgggagcacatataggatacagacgtgtggctgcctacaacaaacgttatgaatggaatgatgagttctttacaggcagtaacggcgaaaacggtttcatattcaccggttgggacgagtcaaagaccaatctgttcaccgtcggcgcagagctggcgaagacaattgagatcgtccgcctcaacacgaagctggatatgcatttcttcaactcaaacttctattacaacgcacaaatcggtgccaaatatttccctgccggtgacggcaagacgaatatcaacgccatggcaagtatcggatcagcaccggaaacggccgtactggactatgcgttacccggttcattctcacacaccaataccatggtgggcctgggagggcaatatatggttagtccaaacatcaccataggcttaatgggtacatggaacacctattataaccagaccaataccgtgaaaggaactactcagttcgaccggatagaaaccgtatcgacacgctataaaaacttatataacatctatgcacaaatttacatttcattctaatgggttttgtcccctattggcaggaatgatatgcatttgctgccttatatccggctgccgtatgcaggcgcgcacagatatgtttccctccaaggaaggttatctcgtcactatcggcgaagacccgaccgataaagatacacggtgggccaaatacctgtacgagcaccttaagaagcgtgctaacgacgatgaaatggtcgctttcggaatatctgagaaagagatgtggcgcatcatcatacaaatagaccctacgttgcaaaacggatttaaaatagcctgcaaaggttccgacatacgattaacagcctcggacaacaaacaaatgttatggcttcaataccaactgataaagaaaatcagcaaggaagatccccgaatagacggttccgaccttccgccagccattatccatttaaaagatacctgcggctcttttgctttcgactatcagagtatctattctcccgccggcttgaaccccgacaacacaggagtgatcgggctggacgacttcgacagcagttggggaatatgggggcataacctacggaaagtattaggagccaatacagagaaagtatacgccaccataaacggaaaggcgaatgattcgcagctctgtttttcttccggcgagatgttccggctcattgaaagttatattaccgataatttcggtgaaaagggaaagtttcgttttgtgattgccccagatgatactccgtacgcttgcacgtgcccttcgtgcacagctatcggaaacactgaaaagaatgcgacgcctgccgtcacagagctaatcctccgtttatcccaacgatttcccagacatttcttctttacaacttcttatctgactacgcagcaggtcacagacaaacaattgcctcccaatgcaggagtaattgtcagcgccataaacttccctctccgccggatagacggtaaagatgcaaaagaaaaggcatttgccggacaactggaacaatggaaaaatgtaacgaagaacatctatatatgggactatatcaataattttgatgattaccttactcccatgcctatattgaagatagcccggcagaggctccaattcttcaagcaacatggagcgagtggtatattctttaacggaagcggatacagttattcctcattcgatgaaatgaggacatttgtgttatcggcgcttcttattaatccggagctttctgttgacaacttaaccgcaagtttctttaatcaggaatatccggcagcaaagaagtggttgtatgactactataccgatttagaaaacggcacacagtccgggaaacggttaggcatttatgccggcatacgggaatcggaaaaagcatatcttactccggagaaatttatcaagttctatgatgaaatgaacgattttgtatccaatgccaaaggaaaggaacgtaaaaagctccatgaactccagacggctctctcttatacacgtatggaaatgggacgtgaacatagtttcgatgcttacggatatgcaaaacgaaacggaaaaagtcttcaacctattccccaagtacaggaatggctcacccagctcaaagagcacaaagcattcaccggaatggaatattacaatgaatcttccgatgaaatcggtaattatataaaggaatgggaagaatacatatttgcttccgacctaaaaaagaatctgtttttaggggttactccttcagttatcccgcaagcatacaagaaccatataaagaagctgaccgacggcactcacggcttacccggaaactatcattgcggctgggtaatcattccggaagaagaatgcacaattaacctccccgtgaaaggaataaatacatccggaacgatttacatcagcttccttaaccttcccaggcatcgtttctatactccgcaacaaattgaactgttgaaagacggaataatttataagaaaattgacctggaaccggggccccctgccgaaaaaggagaaatggttaaaacaagtatcccggcagatttgaacggaacagagcaattaagtataagaattacgtgctcgaaaaagcccggagcacaaattggcatagatgaaatagcattcatcccactaaaggctgatataaatgtagcattataaaaataaattagcaactatgaataagtctatatcctatattattttattaatcgcattccccttctactttacagggtgtaaaaaggaagtgcgtcctacaagtatgaccatcaaggattcgatcaggcactattatcctatcaagcaaggtcaacaacttgaactcatgtttactataaccaacacaggagacgctccattaatcatttcagagatacaaccttcctgcggatgcatcatactcgacaaaagttcgcacatcattataccggaagacggcatccgacaattcaaagccacctacaacagtattaagaacgtaggtgaagttgtccaccgcatccgtattttcgggaatatgcttccacacggaaaagcagaactgaaatttgatgtgaatgtagttcctgacgctgattacacgcgcgactacgaagaactctaccaagactttaacaccaagaatggtatcgtcagagaaatggtagatggaaaagagtctgaactaggatactatgtaggagaaccttaagagagtagtaagctttttcaaggatgtatctctttgaaagctgcattttcctcttttacttgctgaatggtctgcttcaattccccgatcggcaaatcatatccataccagcctgtataacagtccactacataccatttcccatcggcagcctgttcaaattcgacacgcaagtcgatttctgattcctcataacctgcttcgaacactttatgaaccggctcattgagagtgaacttagaaacataaataccaccttcttcctgctcaatgcgttcctccttcatcgtttcactatccagcaacggccatttttctttggtgaacggaaacgttttctcagtttctccgtcatcggccaataaagtaatcggtgtctttaatggaaacttgatacgggtatattggaatgctgcactggacgtaaacttatcaaggaatgatttaaaatcctcgccggactgtgctatctcattcttcgctttggccctggaactattaccgcaagaaatcaaagacactcccaacagcaacacactggctaacagacaacatacaaaccttttcacgttcataaatatataatattagtgattcattcccataatacaaatgctatcattcaaggcacaaagataatcacaagttcaacatcttcatacacgagagccgcgaaatagaaaaattaccgttaaacaactataaattacatatattagatgtggggatgactatctttagggggtatttactgtaactagtatcactttaaatcagacatacttatgacacacattcatccattccgtcttttcgtctttttattactatgctgtacacgagttatcacattcgcccaatccgacagttaccagacaatacccgaatctttgcggggttattggcaatacaaaacagagaacgtatccgactggaacggacctctcattggagagaattttgtagaagctctctataccgtttttcaggtcgaacaaatggaaaagaaaaccgatggaagctatctcttccacctgcggaaccaaaatggaaataaaatggatttccgtttcacccctatcagcgaagatagtgctatcatcttctatcaaggctggaaagaacctaaacactgtgtccgcaagcaaattcccgaccacacggaaatgctcactcccactacactgcctgacatcatttacaagaaatgggtggaaggattgtccggcaatgttatatacgaatttacacgcgatggtaaatttatatatgacggaaaaacatgggatatcgtatctgccggacatttccttaataaagagtatcgtctgctcgccaaaaacggagaacggtacaaactgctttaccttagctttccttttcccaactcaatgaaggttgcagccgaattacagaatgagacagtatttcccatcgcaacttcccgccctgaagtatataccatcaccggatgttgggtgaatcaggcaaccggcgaatggactattggtttctttgaaaacttcgccgtataccaatgccggttctgggactacgaatccatacaaattaaaaaggatgaaaccgtcgtcaaactaaaaaacaatacaacccgcctgactctatctctgaaacataagaacagagcttcttgcaacattgcattcggaaaagataatccacaaaaatatatcctctgtaacggcaaacatctaccggactacccgttaaccgatactacaccgttcatcgacaacgggtaccggacagacagcgtcaccctcaccggatacctgcgcaatcctccttcttcacgccctttcgacgttagcatacctgacatgattacaggcaaagaagaaaaataccagactgacatcgactcgctaggacggtttaccctgcgatttcccgtactgaacagtcataatgtctttatcgactggggacgtacgaccatctggtcggcggtagaacccggagaaacttatttcttatacgtagattatgcccaacaacaaaagttattcatgggaaagaaagcacgtgtactcaacgaacttctctcccatgaaggactgagggaatcactcgattataatgaagaacaaaaaagaagtaatctggagtgtctgcacaagacacaggaaaggcttcatcgccaactggagttccggaagaaaacactccaagaacatccgttactttctgacaaataccgctactacaccgaacaggaactacgatacgatgcggcatctaccctgatgcaacgacgtttctcagtagaccgtaacaaacaggaacatttggaagacgaattcatgaactatatagattctgctttttacccacatccagtacatccttatactcttctcagagggtataattcattcatgagagattacattggttatatcgacgacacaactccatcatccaacagcctaaccttaacacctcaaaatatggagagactttactttgcctttgaagccgaaggtaaagtccggctatccgaagaagaaaagaacgcactacgcagtttcagcaaatatcaggaagaaattgaaaagttgcagactgccaaagccgattcagcaaccattaaggcttacaccaaggaacaggaaactgtcatcaaaccccagatagaaataatagagcaactcattgccagagacggtcttctcaatgaatatatgacaggacagatgtacgttaatgcaatcaacaacagcatggcaattatcgactcccttcaaatggataaggacctgagagagattctaaaaacaaagtgctattatgaaatgcttcaatatacccataaggaattgcccgacagccttatcagtaaatttaaaaaggaagttacgaatccttctttgcaatcttatgttttggtccagcaacagaaatatgataaagtatcacataaaaccatcgagcatccggaaagcctgatgccgaatgcccctctggaaggaataacggacggcgaacagttattccgcaaaatcattgagccatacaaagggaaagtgatttatctggatatttgggggacttggtgcggtccgtgcaaggatatgatgcaatatgcgggaaacattaagaatctatttgcaggaaaagaagtcgtgttcctttacctttgcaatcattcgacagacaagtcatggaaaaacattatcaaagagtacggtctgacaagcaaaagttcagtccattacaatttgcccgacaagcaacagtctgccattgaaaaatatcttggagtccattccttccctacctatatgttaatagataaggaaggaaacattgtaaaccgcaaagctcccagacctacaatggaaaaccaacttctaaatgcagtctataaggaactggagaagtaagaggaacttacttcttccgcaaatattcatatccgaaacgacaatacaaacatttacgtttatcacaatattctttttgcaactgtatcagcgcctgactatccgcagcagaagctaccggtagtccggcgtcgctccaggagcgaataatatggttattctccgctttcagtttttccagaaagcgtccggcacgttcgcacattccttcatcggccttgtgcaaaccatacgtatacaagaaagggacaacggtattgatgataatcaggtctttcgactgttctcctaacaatttttccctttgtggagaagtacgaccgaatatataatgattctcccaataaacagaagtacgggtggagagcaaaattctcacttccgccaatgtcttcgcctccaataaacgggaaaacaacttgtcccctttctgataaagataagccagttgtgccagccggatatgaggaaaattatccgggcgaagccggagaaaacgccagagagtagcgtccattacccgaaatatctcaaacttccgttgcaaataatgaaattctttgctaagacgcaggcagtattcatccttttgttcttctttcagaaatgtatcttcaaacagtcccgccataccatagaaaagagcttctatctgaaacagatcgttccggtgcttgtccaacgcacgaaacggaagcagctccgcccatgcctcaaaagcatcaccgttcaagccaaaaccataattacgggcaagagtgatgaagaaaacatcttcccagttgttgttacaatgttcgagacgtgctcctatcagtttcgccttttgttccagccgttccgtttgcaaggcagacaaccacgaatgaaccgtaagcttcggtaaagaacggaggatcggataacaagccggataacagtcggacacgcaaagttcataataatgcatttttatccgttcgggacagctcactatcatttgcggaatgacttccccgttggtacgggtcacttctccgtccgcttcacccactatatgcaggatcaccgagtcatagactttatcaccatcgtgcccgtgacggaaccaatccgaagaacgggtatggatttccacgtttcctacccataaagtattgtttatctttaatttggcattgaagaaatcaggaccggaattcggattccggagaccgggatcaataacctctaccggtaagcctttggtggtttgcaggatttcaagggagaataatttatgtttccacacgtagtggagaaggtgttccatgttaacaagacgttaatgtacactgcaaatgtaataaaaatcttatctttgcgactattattttgaatataagtcagaaaacaatgaaaatagcattgatcggttacggaaaaatgggcaaagagttagaaaaggttgccctgagtcgcggacacgaaattgtctgcattattgatatcaataaccaggaagacttcgagtcggaagcattcaaatcggctgatgttgccatagaatttacaaatccgacagtggcttacagcaactatatgaaagcctttaaagccggagtcaaactcgtatcaggcagtaccggatggatgtccgaacatggcgaagaaatcaagaagctctgtacggaaggcggaaaaacgctgttttggtcgtccaacttcagcttgggagtagccattttctctgctgtaaacaagtatctggccaagataatgaatcaattccccgcgtatgacgtcaccatgagcgaaacacaccatatccacaaactcgacgctcccagcggaactgccattacgctggcagaaggtattctagagaatatagaccgtaaggataaatgggtggaagggacatttacggcaccggacggaacaatcagcggaacaacagactgcgctccggacgaacttccgatcagttctatccgcgaaggtgaagttttcggtattcatactgttcgttatgagtctgatattgacagcatttcaatcactcacgatgccaagaaccggggcggtttcgtactcggagctatattggccgccgaatacaccgcgcatcacgaaggtttcctgggaatgaaaaacttatttccgttcttaaacgaataaaggttctaatataaatataccactatgaaacaagccacacgtgcacaatggattaaatgtgctattgctattcttctctatcttgttttcctcatctgggtgcgaagctggtggggattaatcgtcatacctttcattttcgatatctatatcacaaagaaaataccctggtcgttctggaaaaggtcaaagaatccggcagttcggagtgtcatgagctgggtagatgctattatctttgcattggtagccgtttactttgtcaatatctatatcttccaaaactaccagattccttcttcttctctagagaaatcattgctggtaggcgactttctatatgtcagcaaaatgagttacggcccccgcgtgccgaacacaccgctttctatgccgctggcgcaacatacattaccaattgtaggtactaaatcatatatcgaatggccacaatggaaatataaaagagtgccgggattcggcaatgtgaaattgaatgacatcgtagtgttcaacttccctgcaggagatacggtagccgtcaattaccaacagacgacagacttttatacattggcatacggcgaaggccaacgcatatattccaaacagatagatatggatagcctgacacgcgaacaacaacgtgccgtgtatgacttatattacgccgcaggacgcaaacagatcctaaataacccgcgaacctacggagaagtgctctggcgtccggtagaccgccgcgagaattatgtaaaacgctgtgtaggactgccgggtgacacgctccagatcgtagacgggcaagtcatgattgacggcaaggcaatccagaatccggagaatctgcaattcaactatttcgtgcaaacaaccggtccatatatcccggaagaaatgttccgcgaactgggaatcagcaatgctgacaggacactaatggaagactccggttatgaaatcggactattggaaatgggactcgacagccggaatgcgcaaggaaaactgaatcctgtatatcatctcccgctgactaaaaagatgtatgacactcttctgggcaacaagaagctaatcagcaaaataatcatggaaccggaagcctatgccggacaaatgtatccgctgaatctttacaccaagtgggaccgcaacaactacggtccaatctggattccgtccaagggagctaccattacgctgactccggacaacctgcctatctacgaacgttgcatcgtggcatacgaaggcaacaagctggaagtgaagtcggacggtatctatatcaacggtgaaaagaccaatgaatataccttcaaaatggattactactggatgatgggtgacaaccgccataattctgccgactcccgttattggggctttgtacccgaagaccacgttgtgggcaaaccgatcgttgtatggctgtcgctcgataaagaccgtggctggtttgacggaaaaatccgttggaaccgcctctttaagtgggtggattaaaaaaggaagctattaagtgaacattcgtaaattcaaatggatactagtatttgccggagcaatagtcattgtgcttctgctccggggatttgcttttacgtcttgttttatcccttccaccggcatggaaaactctattttccaaggcgaacgtattctggtgaataaatggagttacggcctgcgggttcctttcatgtcgatattctcctatcaccgttggcgcgaacgtccggtacgagaacaagatattgttgtgtttaacaatcctgccggaatccggcaaccggttatcgaccgccgcgagatctacatcggccgttgtatcggtgttccgggtgatactctatttatcgattcccttttttctgtgatttctcccgaggtacaattcaatccggacaagaagcggctttatgcttatccggtagacaaagagaatctgataactttactcatgcacaccctttccattgacgatgacggtttaatgggtagcagtgacagtacccatgtacgcagtttcagccgttatgaatattacctgttggaacaagccataaacgggaataactggattcagcctttggcggggaagaaagacaccgaactgcgaccgcttatcgtccccggtaaagggaagttcgtccgggtacatccttggaatattacactactgcgaaacaccctcgtgatgcacgaaggtaaacaggcggaaatcaagaatgacactctttatgtggacggcaaaccaacacaacactgttatttcaccaaagattattattgggtgggagccaacaacaccattaacctgactgattcgcgcttgttcggattcgttccgcaagaccatctgatcggcaaagcctctcttgtctggttctccaaagaaaaagacaccggattgtttgacggctaccgttggaatcgttttttccggacggtgaaatgatcttccgggcagcacgacaatcccccgaacagtaacataaacgactctcaaaacgtataaaatgaaagaaatgaaaacagcttatttatcttcagcctacctcgctcctgtcgagtactacaccaaactactggcatacgacaagatttttatagaacagcacgaccactatatgaaacaaacctaccgtaaccgatgcacaattaccggaccggacggtgaactgactctctctatccccaccgtaaagcccgatacaccgaaatgcccaatgaaagatatccggatttccgaccacggcaactggagacacctgcattggaacgctattgagtcggcctacaacaatactcctttcttcgaatactacaaagacgatttccgtcccttctacgaaaagaaatacgagtttctgttcgatttcaacgaagaactctgccgactggtctgcgaactgatagatattcatccggttatagaacgtaccgccgaatataaaatggagtttaccgtcgacgaagccgactttcgtgaaatcattcatcccaaaaaggacttccggacggccgatacagcgttcgttccgcagccttattaccaggtttttgaatccaaactaggcttcctgcctaatttaagtattatagacctactttttaatatggggcctgaaagtttgctaatactaagcaaacattaatcatattctgtccagccactgtaaaacaaaacacaaaatatagaagagaaatcatccttcacctcctccacatctataacactgtctcacaacgtttattggacatatagatccaatgtggtgggcatatagctccagtgtggtggatatatagatccagcgccttgggtatatagatccaataactcaggtattaatgccctgaaaaagggacgttaatacctgataattaaagaattcacacctggcaaaacattaacaattagcatattgcaaattgccataacagacatcctcccaacaatccattcttaccaatcaaacacctattttaattcaaaagggacaattccctttatatctcttgacgagcttccgataatggcctcaaacctacccggttcagctacccattcgtgttttgcatcatcaaagaagctcaatgcttttttatcaatcgtcagcgttaccgctttttcttcacccggagccagtcgcaccttttgaaaagctttcaattctttcaccggacggggcagagagaacttcttatcactgatataaagttgaacgacttcctgaccctcgcgggttcctgtattcttcacattgacagtgaacgaaatcgtatcatcggcggtcattgtttttttatctgcggaaggtttgctataagcaaaagtcgtgtagcttagtccgtggccgaatgggaacaacggtttgattttctttttatccgcccaacggtacccaacaaagatatcttcatgataggttgtattaatggtatcccggctatgtttggactttgccagttcttccttattccccggatattcacccagtttatgagcacctacatcttccaaccttaccggaaaagtgaaaggtaatttccccgaaggattgacgtctcctaccaataccgaagcaagagccgttccggcttccgaacccaagtaccaaccttgaacaatggcgggcacttcgtttacccaaggcatagcaaccgcattaccggagatattaacaaatatcaggtttttatttacttttgccaggtcactaattactctatcctgcgcatacggcaaacctaaagcagagcggtccgaatcctcacaatcctggtgattactcttgttcaatccaccgaagaagataacataatccgcatccttagccacttttagagcctcagcaagcagttcatccgccgaacggtcatccttcaggttctgcccggttttcacgccactatattcactggtaggatcacctacatacccacgggcatacactatttcagcctgtaaaccaatacgtttttttaaacctgccaatggagatacctcatattttgtcttcaaagaagaactaccacctcctactgtcatcatcttaatggcattttcaccgatgacagctatctttttcactttatccaagttgaccggtaatacattattcttattctgtaaaagtacaatgccttcttcaccaattctgcgcgcggcttgtccgtgttcgggagaccctaatgagccgaacggtttattagagttcatggaagtacggaaaatcagacgaagaatgttactgactttcgcatccagctcttttgtcccagctttaccttcctttatcaacttcagataaggataggcctggtaatagttatcataagcattgcgggttccggtagaaagaccgtttgtccaagaaccaaattccatatccagaccattataaatagcctgaccagtattatgtacacctccccaatcggataccactcccccattaaatccccattcatcacggagaatgtctttgagcaagcgtttgttatgacaggcatgttcaccttgataaaggttataggcacccataattgcccacgctcccccttcttgaacagccgctttgaaagccgggagatatatttcataaagggcacggtcagtcaaatgtacattggtagtatggcgtttaaattcctgattattcagagcgtagtgttttacgcaggctgccactccgttctcctgtacccccttaatataagggactaccattatagaggataaatacgggtcctcccccatatattcaaagttacgtccgtttaaaggagtacgacagatatttaccccggggcccaaaagaatgtcttttttgcggtaacgcgcttcctcaccaatactctttccataaagataggacatttcgggattccatgtagccgaaagacaagtcaatgcaggaaaagcgatacaggaatcgtttgtccacccggcctgattccatttatcccacaaaacctcgggacggataccatgaggaccatctgttgtccatacttcaggaatacctagacggggtactccaggagaactgaatttggactgagcgtgaatcatcgccaccttttcttcaagcgtcatgcgagttaatgcatctttcacccgttcttcaacagacttatttgtatccagatatactggtgtctgtgccaaagcaggcaatgcagccgccatgaacaagctcaataaagttaatttgaatttcatgtttgttacttacattaaaggccacacaattaggctatgttatttttaatcctatcaatgaccgcaaagatagaatgcccttaactccataagaggagaaatcgtcctttccatgatacatttatgtcctctccattaaaaagctcatttttaacatctcattctcggctaaaagctttacttttgtatggtaatcataaacacgcttaatctcaaaatccccgctatgaaaaggaaatcgttactatgcctatttcttatcatatctgttgccattcacggaaatatctattttaagcatttaggcaaatcagatggtctgtcacaaatatctgtactttctatctgccaggacgaactggacagaatgtggtttggtacactcgaaggcttgaactgctacgatgggaaccaaatgaaaacctataaaccttctccggacaataaagattattttggcggtaatgaaatatcacacatagtaagtgacaaacaaggtaatctattctttacttccgacgggaaactgatccgttatgatctacataaagatcgctttttatctctaccactacgcacacaaactctattcgcacacaaccatacaatatggacagctgttaatgacagtgtcttccaatgggaccgggaacaagaaacattcagattcgtctaccaagcccctttccataaaacaatcatccgcctttatgtagatgccaataacagtctctggctgggtacccgaaacggactttacagaaccgataacatccataatccttcatcccccgtctgcgtgattccaaatatcaacgtgctttcattataccgggacagccgtggaacgatgtgggtagccaccttccgcaacggcatgtacaagatagagaacggaatcagccagcaatttaccatccaaaaggaattcggtatctccagcaatgatgtgcgttgctttgtggaagacaacgagggaagtatttggctgggtaccttcaacggactgaacaagatagataccttagggcatatttcatattatcaaagaggaagcaaacccggaagtctatgccactcttctattttttcacttcacaaagaccggcaaggtactatctgggtgggcacctactatggtggtgtcaactacttcaaccccgaagtggatatctttcaccactataccgaaagtatcggcaacgaaaacggattaagctttccttttgtcggaaacatggtggaagacaagcgtggagacgtatggatttgtaccgaaggaggtggtctgaactgtctggaacgggaaaccggacgtttcactcactacctaatggacgcaaaatcagcccacggacctttctacaacctgaaatgcattacctacgatgccgcaaacgaccaactctacataggtactcacaaacagggcggcttgtgcttcgacattccaagcaagagagttgccttccactccaaagcatttggaaatacctggataaaggtaacgttcagagatgagaagatctatctccttacgggagaagggatgtttgtcaaagaaggaaaagggaacttccaaaaactattccctcaaatcccggaagcaaatacagaaggaagtaattttttgatagattctcaaaactacctttggataacccattggaggagaattgtacgtatcaacatgaacaatccgcaagaaaaatatatctatcaatacggtgaaaaaggattgggaaactattatgtgcagagcatggcggaaagtcacgatggtaccctttatttcggtacctccggaagcggcatctatcggttcgacggaaaaaaagagcaatttacagcttgcacagatattgatgctgactattgctacaatatggatatcaccaccaaaggttatctggcaatcagtaacgaccatggtcttctcatttatcatccacagaccaaggagaagcagctaattgatgtggagagtttgcacctctctgctatcaacgaaggttgcggacttctgatttgccgtaacggagaaacctttgtaggtggtatagaaggtatgagttcgttcatgaactcctcgttgcagaaaatagcccccaattacaacctttatttttcttctttagtagtaaacaatcgggttatctccgtcggaacggacgatggtattctgaaaagtgctttaccctttgtccgacaaatagagttgaaccacaaagagaataacttctccatcagtttttcttcgaataattacgttaataatactgacagaaaaatatatgaatacaagttggaaggattcagcaaagagtggagcaaaaccaacggtaatactgtggtattcaccaatatcccccccggaaagtacaaactggtaatacgtgaacaacaacagagtctactcgacgaaatacatgctatcgaactccccatccttattcatcatccctggtggaacacctggtggatgtggattctttatctctgcacaatcactgtcattggctggaatattttcagtgaagcacgttccaagatgcaactccgcgcctcactggcacaagaaaaactggaaaaagagaagaatgaagaactgatacaagccaagttgcagttctttgccaatatctctcacgagtttcgtacaccgctaacactcattatcgcacaaattgaagcactgttacaagtcaataccctctctccttttctgcgcagtcgcctgacaaaaatctacagaaacacattccagttcaaagagctgatctcagagctactggatttccggaagatggaacgtgggaaactgcatctaaacgtttgccaaatggacctcatcccctacttgagacaaattcatcaagatttcacagaccaagcgaacttacagaatatacagttcatattccatacagaaacagaaaacttgttgtgctggttcgatggacgacaattgaggaaagtcctcaccaatctactttccaatgcctttaaacatacgcccgaaaaaggaaaaatagaattgtcaatcactgataaaggagattctatttatattaaggtgatagactccggcaaaggtattcccccaaaggccctaccgttcatcttcgaccgcttctaccaggcggacgaaaacttttcttcacccggtagtggtatcggcctggctctttcaaagggtattgtagaactacaccacggtcaaatcgaagtgcaaagtgcaatagattatggaagtatcttcacagtaatactacccaaagaaaatctctttaaagatgacaacgatgtcaccttcatagaggcaacaaaagcggaatctgcaacaatactcgcaccattcacagaaacgacagaaacagaagaatgtgcagaaacaccggaacctatttccattggaaggacggacaaggactgcgtactcattgtagaggataacgaagaactgctccaactgctcaccgatctactctcgccactctaccggatagttattgcgatgaacggcaaggacggactacaaaaagcaatggaagaacgtcccgaccttatactaagcgatgtcatgatgccgaaaatggacggtattgagatgtgttccaagataaaaaccgacttcgacctctgccacacccccgtagtactgctcacagccctcacttcgaacgacaaaaagttggaaggactgcaatgcggtgccgacgaatacattgggaaacctttcaacaacaaaatgctgcaagctcgcattgccaatatactgcgtaaccgaaaactgctaaaacagaaattcagccagaaaatgacaactagtgaatctcctgctgaaattgagatacaagcactagcgcttaaccctattgatgccaagtttctggaacagttagaggaaacggtcaaagcccatctctcagactcagaattcgacgtcggtgccctagccaaggaaatggctttaagccgtagcgcattctacaataaactgaaagccttgagctgtatgtctcctaacgagttcattatgaatgcccgcctgaaatacgcagcagaactgttgagaaatcatcccgagctacaaatcacggaaatagcctatcagacaggattcagttctctacgttacttccggcattgcttcaaagcctgtttcaatcagtcaccacaagagtacagaggaaagtgaaaaatcccgttctgctattgttgctgaacgggattcactctttgataccctgagcctattgattacatgttttttaaattttattttattcttcggttgctgcccattctttggcgccttgttctttcaatttgctagtgaaagccttcgctttttccatcgctgcttcctcgtcagcaggagcagcataagcgtgtctgtagcctttcaccttattccattcaccacgggtaaagtcaggaaatgcaacagaggcgcaaccattgtccatagagagttcacccaattctgccaagcagcaccattcagccaaatcataaacgtccatatccaacggaagaccattctgcaagcagtaaaccaaacggctgtccatgatgaaatccataccaccatggccgcctacctctttcgccatctcaccatactttttcaggataggatgttgatacttctctactaaagctaccatctcctctctcggcatgaagccatgtgagttcaagtcgtccaccttaggctgaacgccggaagccttcaactgctctgcatcaagggcgtacccttgagtaggatatttattggcaaaacccttagtacccgtcagttgataaaggcggttgtagggttgcggagtcatcacgttatgctggatttcgatgaccttaccattagcggtacgaatcaaagtagtagtgtggtcaccattacggaaactattacaaacagaatcggcattttctttcaccaagtccttacctacgaccgatttggtatccattgctactaaagtctccatacggtcaccacgatgaatattgagggcctgcgccaccggaccaagaccatgagtagcatatacatcgccacgatgacgcatattataatccaaacgccagcccaatttgtcatcctcacctttcttccaataatgcttccagaaaggagcaagattatgaatataggcaccctgcgcgcgaattacctcaccaaacactccatgttgtgccatatttaaggtattcatctcaaaccagtcataacaacagttctccaaaatcatgcagtgcttacggttcttctcactaagatcaaccagttcccaacattctttcaggttcatagccgaaggaacttcaatcgctacgtttttgccattctccaatgcgcatttcgccacaggaaaatgatgcaaccagtcggttgcaatataaaccagatcaatatcatcgcgtttacacaattcttcgtaacctttatcacccgagtaaacagccgcttttggtaaagaagcttctttcagatacttttgacacttctcagcacgctccttttcatagtcgcacagtgctacaatctgtgtgccaggaatgtaagtgaaacgtgacacagcacccggcccacgcatacctaaccctacaaatcccacacgaactacttccatcttaggaagagccagcccgatgacactctcttgtccggcaggtcgttcgggagttttcactacaattgttcctttattccactcccattccgtacccttgtcgttgacttgtacagtagatttctgcattgtacatgaaccaaacaagaggcatatgcccaatgctaaaaaatttgttattttcatacgtaattattaattaaattattcttagtaggctatctcatatttcttttactgctcatacgcaccacaacctttcctttaccaccttccaatccacattctgcctccaacatattgtaaccttcaatgggatattcacccttataggtattctttgccggataagttttaaaggtagctcctgccggagcgatgatttccatataaaaatgtttgccttcatgcgtcaagcgtacccggttctcttttacttccacttgtgccttggtggaagctatccatgagactatagactgcgggctgagtaagtccacttcatccgttatctctattgtgtaatcatttaacaatttgaacgtgcggaatacagaagaagcctgatctttgtatagagtagtcatatccagctttacagaaggctgcttcgcatctgtatgctcttcgcaaacaaatgcctcgccattggcatactgaatcttatggtcgatactcaacgtattatgggaaaaattgttattacggaaatacttccaacgttgtccgtcaggacgtccgtcccaaaatcccggtagggcataatcatcagctcccagatcctctgtccaacaaaccccattgctttcaacaatgaatgtacctccatccaaatgttgatgcgcttgacgaggttctccacccttggctatcaaaaatagagaacctttcttatttctattcccattgaaaactattatatcattaattgtgttgtggtatatttctaaggcaggtattttctccacttttttaggtgaagcattgtcaaaccaaggaagtgacagaaagaaaagctgatgtagaagtaaattatcctgcatggtcaattttaacttttcccgataccattcagccacttcaggttggttatacatacggctgaataagaaaaatgctggagaattttgagcatcagcccccgcattaccgaaattaaaaagacgaccggacggagtaagtgtccgtttttgataaagcgccgtgcgctccaagccgggtagttgtgctatacctccctttccattgtcattatcagccaccgcctttaggtagagagttaaataactggtagtatatccccaataagcagggccctcatagcatacgccatccggagcaaaatgtttcaggcagttgggcatatacttggcagcattatcaagaatgacagcggcctctttcggataatcttctgcaatacccaaagcggccagcaccataccagtgttacataccacgttccaattggtttctcgtttcgcccaacttcccaagctacccttttcgtattcacgcaacacacgaacaatggcacgttcgtacaaacatttctttaccaagtctttagtcgaaataggcagcgcatcatacaaccagtcataagcaatagctacggcagttgccatttccgcagtatccaaatagtgaggtggatcccagtcgggatagttacacacccacaataaagcctcgttggcggcatccaagtatttccgctcaccgtagagacggtaagctaatgcaagcgtacccaagcggttcacataggatcgggatgtccacaatatattaccatatttatcctttaaataaggtttctgcggagtaatcgccaatgtatccgctttcgctttcaagaactctgccaactcaccggcaagctgattgttttgtatcaactgcttcacagcagcttcttctgcaccagtgaacagcaagcgagggtgattggaaagaaagcgttgctgaccatacatattgcaaacaaaaagcaacatgaatacaacaacagtgcatctgcccatatttgcaatcgaattaaaaaatagatttctcatattgaaagaattaaatgcaactcccgtgaattgtttttatgtcatacaaaaactaatctgtcaattttgtcacatccatactcggtttcggatagtttttagaagcaatgtagtgctttgtttcctcaatcatcttgggagtgacctcaaaatcatagttaccataatcgcctacgtgaaattttccggtctgaaagaacccccacgcatcgaagaagtccgtaagatctgttttcaggaaatcacagcaaagcttaatatactcatacatattatgaatagatgcattacccgcccctttatgaggttggttacgtaaatgctccatcaggtcggcatagaaatccttataaccaatcttatcggcatagatttgaatttgccagaagggtatcaatttatggaaaggatccttcacacacataataaactgcttttctggcgcattaagtactttactaaaagcagcctcataaatatgacgcttactcaaacgactggaatcacccaaactcatagtgccatacatggagaaaagattattgctcacttctgtcattcctccccaagtaagccagggacgcatctgcatcacgtgtcctatctcatgatgaatgccccagttagttgtcacttccggacctatcgctgccttcatagtgccatctgtaccctcaaaagctacaccgtcaccatcacgaaacataaaatagttaaagttaacacgggccaaaatacgtttcttaggaatacgattatattttgtagcacccgagaaatcatattgtacctgcattatcttgtcataattctcagccagttccttgcctttgccataagccaacttttttaattgctccacagggtatgctagttgaatatatttccccttcacatccataacagggctgaccgcattatctaatagacggttccagtcttcgttactctgtacagtagcgtcaaagtacccatttaccttcccggttacaaagtgaatggtaactgccggtgcagtgtcggggtcatccgcgaaatagtctacatacacattgccagctttcttcacattgattacgttcacaccttcgtgtaacagtatctcttgttttttcagtccccatccttcggggtcttttgtcggttgatagcctagagtcggttgacgcatccagtctggaatgagcagtcctacggtgcgtccgtgaaggtcacccaccaatactacattttctccagcttccaaatagaccccggtaatgttttcgtaacgactgtatccgttggtgagtttgagttgttgctccagtaccttatttgagggtataggcttataactctgtaacaagtaggccgagttataatcacctctcagcattttctcggccaattgcttcattagctgggattccatgcctttcaaatgtttgtctttaaagttcttagacagagatgatgctgtccaatcagtaaagttagtaaggtccttgtttacttgataggtggagtaagagggtgtttgcgcgtagagtacccccgccaaactacaaaaggcagccactgtccacttgcgaagttgtttcatatttataacgtaataaagattaatttatatgcaaagataaataaaagaccgcctattctaacaggttgtgctaaaataagcagccttcatttcaaatagcgcctctattttatttaatagaagcggctatacgactaccatcatattgtacggccatcaacttatatccattttcccaagcagtattcatcttataggatttcttactaccttcaaatacacaaataagtttattgtcggcattgagcacttcgaaagctactacattttgccagttattaacggtaatggtagaagtggtgattccttcatcgttagtatcttcttgatgtgaagctataccggctataacattcttctgatccttgaagatatctacggtgctatctacaatatattctacaggatctgtacatttaggcaatcccaaggtagcgatacggtttcttacattggctatctctgtttcagtgatggtgaattgcttgttggtataatcaccaatcatcatatcgatgggtgataagaatccccacttctcaaagaagtcagtcaagtccataccagccgatacgcaactgttataaacaaattcgagttggcacaaaccatcggttgtcggattggctgtggtacgtactttctcatagatgtctgcatagaaacctccgtgatcggtccgtttcatcggagtatttcctttcacttcgccaaagtagagttccaattgccagaacggaactaacttgttgaatacatcgctttcggcattatgtgccttttgacctgccataatgttattgaaagccgacacatagcgatcctgaacagtcaaacgtgacggctcgttgtagaccttagtttgtacataaatggcagtaatgttgtttgttacctctgtcatgccatgccatttcaagcccggacgagtttgatgaatatgtcccaattcgtgtgcaggtccccaacaattggccgccatttgggtctcatcagccagatagttcaaactactttcaatgtaggctgtatgataatcggtagcatacataaatgagccactattataatggacatggaaataactacgattatgaaacatacgatcatacttttccaatcccaagaactcttgctgacgataaatcatatcatcataaaggttaatcaggttatctacatccttagtataattcaagaaactgcgcgtagtaaacgtaagatgcacatatttacctatcacatcaaagtgagtatctacactattattgagtaactctttccaacgtcctttcagttttggattttgactatcgtaatatccatttaccttacccgatgcaaaatgcagagtgatttcaggggcattttcataatcatctttgtgatacatcacatacacaagtcctttctctttaatgctaatagtattaacaccgtttacaatggtatattccgttcctccaaatccatcttgtcctggtttgtcgagattctgtacacggatattcactttatccaatccattcaaatcggccattactaccaagttctctccggcaggaacaaagattcctgttggattatcaagtaaactatatttagctgttttattaacagcagcatcgatatcaggatgcggataagccttatagttggcaatacggaactcacgttggtattcattattatacataaaccaagctaaagtcttgtaaaatgaactcttacaattcaaaatatcctcttcggtaacggtaggcttcaagtcagtgcaagcgatatcagtaaacagttcatcatatttgaaagcattgggatctttttggaagaactgcatttcttgacaccgcaatggtttgctcatattatagcaagtactgatagtaaattttacctttgtcacattgctttgggaagcattgaagtctgcacgtgtagagttggcgttatcaaatgtcccttcgtatactttcacatattctgcactacgtgttttattaacatcggtcaacacttcaatcttcacatctttaaaacgattagcagaataggtacaatgataaatgatgtagtccaaatctaccggttcatcaaaagtatattcaatatactgaggatataccaatcctattggagctttccaattcgcttgccattcggtagtcaaatcattatcgaaagttgcatcataatttccaccgggcacaccaccatcaccttccgcactgttgggaaacagttgaatatcgttgccttcttcaggtgcaacaggttcgtaaacatccaatcctttttgcaccacattaataacggttggctccaagtcagacatttcatcactatcggcaaacacaatttcacccatacgttttactcccttgttactctctatttttaagaggtattgtttggtaacagtttcctgcggagcacgggtatcaggttgagtctcttttattatccaatcggggagggtaataatatagtctacattcgaagttacttccaccaatactttatctccggcagcatcgatattcatgttctgaggagataccaaaatagcttgctggtaacctaactgcgctacacgtacagtatctgtttgagaaaatgcctttacataaaattcacctctacgcacatatttgtcttcactcaaaataacacttacaatcagattgtcatcttcattacgagtcacactacaccagccttgtagttctttgctcaattctacagtccattcttcgttacaacgaacctccagtatccgttctccactgttttggtcaaagttcacattgtagctatctaagagcaaaaacggagtgagcggtatatcaaaattataatcgtcacagccagttaatatagtcatcccaaagaacaccattataacccaaccagctattttttttaataaattactcttcatagtatattttctttctgtattagatactttatttgccttccccctcatccctaatagacatgagagagaaagttttttctttaattatagtaagggttttgcacaatatgcgggcatttgttaatttcctgataaggaattggcattagatattgtcccttatggaaatttcgcggtaatggaagatccatcggagtaaaatcttccaccttagtagcattagtattcagtccgcgatcgggcattccacaatgttgctctgctattttccaacgacgaatatcgaagaatttatgaccttctaaatataactcgttcatacgttctgcacgtacaatctctcgcatcccctcttgagtgttttggtaaccaggattagtagaatacttatcccaagcctcatctacactaggaataccggcacgttcgcgtactttatccaaatatactttagcttcggataaacgatccaactcaactaaagcttcagcatagtttaaataaagctctgcaagacggaataacggaaatggatattctattacattccattcagcggacggtacaaccccctttttatttccaaatccagaaatagaatactcctgatcggtacgattaccacgaccatgaggatcatctctcaacaaatggattctgatagcacgcttagccggatcagcactaatttcttcattgttatatttaccaaattcaaaatatccattatgataggtagtccacgcataaaatcggggctcacgatcggtgcaaagacgcattaccttatcactactaggagtaaaattagcatatttcacaagatcctcataattgtttccatcacaattttccggagcattaatatattcgtaacgttcgtcatagtcgaacgttttatccttatttattggaagcccgtttttagtgtaaaatgcttcaatggtttgcaaagtaggacagttagtcatactgataccagcaaacttaccaccgagcgtctgacgaggcggacagcgacgctgtattccataatagtcatcattacgtgtgtcagcccaaataatttccggattattccctgtctgattgtcgatattggtatatctcaatcttcgttgtgctttattgggaagtcccggtttagcatcacttggttcaccggcatccgcatcgtgatagagatggaatttagctttttccacttcatcaattgcatactttgtttgggtagcacttatttcccattttgcttgacttttctcttgagctattaactgacgtccatctaacggactacggaaatcggcatacatttctgtgtttccattatagagcggtgaagcggcatagaggtaaactctggatttcaatgctaatgctgcaagacgtgtggcacgaccataatcttttccactccatgtagtaggtagtccgccttcagacattgcttcatccaatttttcgttaataaaggccactacttcgtctatactactacgttcgggaaaaccactaatgggtgtttctaaatctataacactgcgaataatcatggtcggaccatacgaacgcatagacaagaaatgataataagctatcaaaaaattagactctgccaaatattgttttttcatttcgtctgttacatattcgttggacacttgtttcaagctttcttggaacatgtagcattgatgaataccattccaaatagtagaccatgtattactagtaaatcccaaactgacaggactataataaccgtatttgaaagtggtaaacaattctttggtaacagctgtgagttcttccgcaagccaataactgttaccgaaagttctgttagctggtaaatagccataacaagaatagagatatcctcttaccgcaccttccgtcttccaagtatccgattcttgtgcacgttcatcggggacaatgtctagataatcgcaagaactaagttgccccatcattcccaatacgattaaaaattttgctatctttttcatatagaattcttatttattattaaaggttacttgaataccaaaattgatgatacgttgagtggggtacttcataccactaccgctccccatttcaggatcccaataatcgaaaggggaaaatgtcagcagattctgtccgcttaagtagaagcgccagcctttgaaagtataacccacttcggcatttttcagtttcaaaaacgaaccattacgtaaccaataggttgagttttgtgtattattgccattgttttccaatgtcaaacgcggatatttggcatcaatattttggttttcagtagtccagtggtcatcggctatgtatttaaacaagccgcggatacgtgcctcaccaaaaggatggataccactcatcaaaattgaagtcttagctactccttgaaagaagaaagagaaatcccatttcttgaatttgatagaaggaccaaaaccatatactatttccgggtcttgcggattgcccacataacgtcggtcattgccatcaatcacattatcatattcaccacggtagttaggaagattatgataccaaatatccccaggttgtggagtgtatcccaaagctttttgatcggggttattatggatggtcttttcatcggggaataatccgttgtcaatatagagcaaatattgccctaatgaatgccctaccgatgacaagttaggatattcttggaaaggaggctcatctcgttccaaaatggtattgtgcgcataggtgaatgttcccttgaaagagagaaaaagatctttgttcacctgtttgttataatctatcgacaaatccatacctatatttttcatcttacctaagttagcatataccgttgctccgctcaaacccaagaaatcggggattgtactacctcgactcaagaagatgtctctacgagtctctttgaatgcttcgactgtcagattaaaactattataaagttgaagatcaatgcctacatttatcttttctcctatttcccatcccaaatttggattaaagaaacgagaccatttaggtcccttgtaagttaccctgtttccaccgacacctgtagtgtatccaggactaccacccaaatcaatatcttcaagataagtaaatcgtccggctccggtattatcattacctaccaatccccacgatccacgcagttttaagttggaaatcacaggacgaatattatcccaaaatttctcatttgatatgttgtatcctacagcgatagatgggaagaaaccatagcggttacctgatgcaaagttttccgaaccattgtaaccaaagttagcttcagccatatagcgaccatcgtaagcatacgacacacgtccggcaataccctgtttgcgctcaggcagtgaggaaaaaaggtcagtcacattatttgtattgtactgctgacgattaaacaaaaacatggcattcacatcgtgtacaccgccaaaggtatgtttatagtctaaagtagcttgcagatagagtttacggttaccgctatgcgagcccgaggttttaatagcagtaccacgttcattgcccgttctacgaagagtatattcaccggtttcgtcattttgagaagcgacctcaaaagcattatagtcactcacacgagtggcattactgcttgaattgtttttgtaagagaataatccattgaatgtcaatccttttataaacatacccaaatcctgctgcaacttaaaattggcagtaataatactggtatggtttgttttgtatccggtcacgtagtcagctacaggattcatatatccaccggtagcaaatgggcccccacttttatccccccacataatatcttcggtatcatatccataaccagcaggaaaagaaacaggatagtctacaggattgtgttccatagtagatgcaaataaagaacttgtactagcattcggtcctttccaatctttaatagaggcattcaaacccaatgacagtttagtagtaggagtcgcttgtacattcaagttattaataaaatcgtagttggttacattgatgttattattatagctgaaaccatatttctcgctcaacgagttcaagttaccatcgctgtgtttcacacccacactcataaagtagtccatttttttgttacctccacgaatattgaagttggcacgctgggcaaaagcattttttttgaacatctcatcataccaatctacattaggataaagatagggattgagtccggcacgtgttccttctatcttttccctactatagggagtagcagccgaagtggggcgagcggctccttcattataagcttccatataggttacaccatcagccatttcaggaactttggttagcgaggtcaaggctccctctaagcgaaagttaataataggcttgtcaagatctttaccacttttggtagtaataatcattacaccattggcgccgcgtgtaccatatagcgcagtagcagtagcatctttcaagatagagaaactctcgatagcttcagcatcgagtgaattcaattcagtactgctgatttccacaccatccaaaataataagtgcaccagttgcgccactaaaggtagatttaccgcgaatccagaaactggccccatcggcacccggttcaccactacgttgtacagcaatgacacccgaaagacgtccggcaaatgaagtagacaaactagaagaaggtacctttaattcagcaggtctcacctgcgtcacagcaccaaccaaactttctttcttttgtcctacgccaaaagcagtcacaaccacttcatccaatgattcagtagcttcactcaactcaactgtataagtcttcaaatgacttatactgatttctttgctctcataccccaaataagaaatgataagcacatctccttttgatgctttcaaaataaattcaccatcaagattggtagtagtaccaacagtagttccttttactttgacagcagcaccaataactggttcactcgtttttccatccaaaacaacacctcggatttcgcccgttttttgttgtgctcccatagaattaactaaaatcacctcatttccatttactccatttgcgaatgaagaattcgaaatgaaacaaagacctaaagtcaacaaaggaagcgcactaagaattatgccacttttctttttcataataataaagagttttttgttttcataataaaagttttattttagataaagggttaattatttacagacacaaaagtgaataattccattcaaataaagaggatatttcatctatttcaggtactgaatttgtcttctccatgaaaaaaatctattttaacacaacagagagaggattaacgatttctttcctaaaaaagcttcttaccggacaaaacgttaaaaacaaaagtgaaaacacaaactccccttcgaatggacggaatatccccctacctattttatataggaataactttgcagcataaaaacatctaacatataatatctaataacatgattaaatttataaagaagaatccggcaatcccccaaagatggattgtacttactgcattggcgtgttcactaacaacgacacaggcgcaaacactccaagcagaaaaagcatttatcaaagagaatatggaattcgccaccaaacaatatagtttgatgatgcaaacccctgcacaaggaaaaaatggaaaagctatcatgccacacagtatgcgcaaagacggtactcccagcaaaggaagtatttacctttggacagcaggctttttccctggtacattatggtatctatcaaactacacaggtgacaaagctttgcaagactctgccttagtttatacacatcaaatggaacccgcaaagaccttcacagacaatcatgatattggattcatgatgtattgcagctatggtaatgccaatcgcttcgcaccaaaagacgaatatgaggacatattagtagaatcggcacgttcactctgtacacgtttccgccctcaagcaaaagtcattcaatcatggaatggatttcgcagttggcacggtgacaaagtatatgattttcctgttatcatcgacaatatgatgaatctagaactattattccatgcctccaaagtgacgggtgatgaaagttttcgtaaagtggctatttcacatgcagaacaagtaatgcaccatcaagtacgtaaggactacagttgcttccacatcatatattatgataaaaaaacaggcaagcccatcaaaggagagacttctcagggatattccgataattcagcctggtcacgtggacaagcttggggaatctatggatttaccatgtgttaccgtgagacgaaagacaaacgcttcttgaaaactgcagaaaagatggcagacttctaccttgatcatcccaaccttccttccgacaaggttgcctggtgggactttaacgcctttcaagaaggttacacacccggtatccgttccaacgcctgtaaaatggtaaataactaccgcgacgcttccgccgcagcctgcgtagcttcggcattactggaactgagtacttatagcaaaggtagcaaaagcaagaaatatctggaaagtgccaaacagattctacatgcactaggtagtaccaactaccgtgccgagctaggtaagaatgcaaactttatactgatgcatagtgtaggtgccgtacctcacaattcagaaatagatgtgccgctaacgtatgccgactactatttcatcgaagccttacatcgttataaccgaatgctggacggaaaaagtccactataaataaaaggaaaaaacatgaaaagaaagaattatctaatctgtttactaacggctataatactactgccaataggagtacaagccaaagacaagaaaaaaggaaagaagaatattcccatgacggaaattcaaaccactggcacccaagatcgcgccatatgggtaaagctactttggaaaatatcatatcctgtcatccataacctcgcagaaggaacactacaccagaatatgcccattgagacccgtagcggtgaaacagcaggctacaaagacatgacacatctggaagctgtaggccgcacactcgccggggttgccccttggctagcactccccgatgatgatacagaagaaggtaaactacgcaagcagatgcgtgaagaagtactgaaaggattaaaaaatgcagtagatcctgcatcacccgacttactgaacttcaccaaacacgctcaacctatcgtagatgccgcctatctggtacatgccttcctccgtgcccccaaagctttatgggaaccattggatgaagttacaaaagaacgctatattaaatccttccaatccttacgtgatcgtactggtgcttacaacaactggctactcttcaccggactaacagaatcatttctgttgggaaaaggtgtacaatacgaccagttccgtattcgtgtaagtaaaaataaggtaaaagaatggtatgtaggcgatggctggtatagtgatggtccatcattcagtatggataattataacgcctacgtgatgcattctatgatggtagctatgctggaaaatcttttacctaaacgttgggcaagtcagaaggagctagacgaagctatgaaccgcatgatacgccactctgaattttgtgaacgtatgatagctcccgatggcacatatcccgctttcggacgttcggttacttatcgtaccgctgcattccaatcgttagcagacgtagctctacgcaaaaaattgccctcacacgtttctcccgcccaagtacgttgcgccctgactgccgtacaccgaaatatgtatgagggaaatcagaacttcgataaggatggttggttagtgctcggcttcaacggtcatcagccagaatgtgctgatggttatacctccactggcagcctttatatggcaaccttaagttttctacctctcggtcttcccgctgatgatccgttttggacagatgcatacgcagattggactagcaaaaaagcttggaaaggaggacatctacacaaagattacaaagtggaatactaaaacagggttatcaaatggtccagaaaccaacctttataacttagcaaggcatgaaaatttgtatataaacaataaaaatgttgtgattaaataaccaattaccatcctcctgtattatcctctagtataacggtatagagttaatacaaggggatggatccaaatggtttaatccgtataccactatcttttactgcatagcaatctcacaatactacctgtaaatcagcgttgacaaatattcctcagcaaacatctcattggcgacttccaacaaagtctctgcagtcaaagcctctatacgtttaaagacaagctcggatgattcatacttatggtaatgcaggaaagttttcgccatgcccaacgcattattctcaaaattatcggaggccaccccaatttgtccgatcaactgcttcttggctgccgccaactgagaagaagtcattttcacatcccgcattcgtttcagttccttataggtcaatttcaaacaagtatccatatcttcaatatccgtcccgaagtagatgcagaaagcacctgtatcggtataagaagtcagattggattcgacattataaaccaatcccctgcgttcacgaagagaaacattcagtttgctgttcattccaggaccgccgaggatattattcagcagatagagtgcggtacgtttgtcgtcgtatgcattatatccacggctaccaatcattacatgtgcctgatgtgtgtctttagttaccgttaaatgttcaggaatataaagaggcggaggcgtacggcggttctcaatttccacagcaggaatatccgacatatatttttctgccagacggataattttcttgaaatcatattgtccttgaacgaaaaacaccatattccccggctgatagaaccgacgggtaaaggacaggacatcctccgtgcgaaaactcctcagaagttccggtttccccagaatgtttcttcccagcggatgattacggaatatcatatcttcaaaatcatcgaagatcaattcggaaggattgtcttcataggattggatttcgtcaataatcacttctgtttccttttcaatctcatgttgcggaaaagtagaatggaatacaatatcccccagtagctcaagcgcacgttccagatgttctgtcaggaaggcggaatagacaaccgtttcttctttattcgtataagcattgaggtcaccgcctacattctccattcggttgagaatatgccaagctttccgtttcaccgttcccttaaaaataagatgttctacaaaatgagccattccctgttcatttgccgcttcatcacgggtgccggcatcaatcgcaaaaccacaataagctacttttgaaagcgtcggttcatggataatacgcaggccattaggtaatgtatattcgttgcaatgcattgttttctacttccttattgaattaatgccacaaaaatacaataaaacttattgctgtttatagaaaattgcagatatttgtggactataacagttacaacgtatatggaaaagataggaattttctgttctgcctctgaaaacattgacaaaatgtacttcgaaagtgctcgccgaataggcgaatggataggacagacaggcaaaacgttgatttacggaggagccaacctcggacttatggaatgcgtagcacgcaccgtaaaagaaaacgggggtaaggtcattggagtagtcccgaccaaactggaagaaaatggtagagtaagctctctactggacgaggtgattcatacccgcaacctgagcgaccgcaaagatataatgacggaaaagtcggatgtattggtggcactgcctggaggcgtaggcacactcgacgaagttttccacgttatagctgccgcttctattggctaccaccacaagaaagttatcttctataacgaatatggtttctacaacgagctgctgaaagcactcaaaaccttggaagaaaaaggctttgcccgccaacctttctcaacctattacgaaatagcaaacactccggatgaactaaaagaaaaaataaactgatcatatgatagactccattaaacaacttttacaacaggaagcacaggctgtgctcaatatccctgtaacagacgcttatgagaaagcagtacaacttattgttgaacagatacatcagaagaagggaaaactagtaacttccggtatggggaaagccggacaaattgcgatgaacattgctaccactttctgttctacgggtattccctctgtatttctgcaccctagcgaagcacaacatggtgacttgggtatcctgcagaaaaatgatttgctcctgcttatctccaactccggcaagacgcgtgaaatcgtcgaacttacccaacttgctcacaatctggacccggaactgaagtttatcgttatcacgggaaatccagatagtccgttggcgcacgaatcggatgtttgcctgagtaccggtaaacctgccgaagtttgtacgctgggtatgactcctactacttcgactactgccatgactgttatcggtgatattctggtagtacagaccatgaaggaaaccggattcaccattgccgaatattcgaaacgccaccacggaggttatctgggagaaaaatcaagatcactatgcgaaaagtaatcggtatcggagaaacaatcctcgacatcatctttcgaggcgaccagccttccgcagccgtaccgggaggctctgtatttaacggcatcgtatccttaggccggatgggagcaaacgtcggtttcatcagcgaaaccggtaacgaccgcgtgggaaacattatcctgcaattcatgcgtgacaacaatatcccgaccgaccatgtgaatgtattccctgacgggaaatcaccggtatctctggcttttctcaatgagcaaagtgatgccgaatatatcttctacaaggattaccccaaacaacgtctcgatgtcctgttcccaaaactggaagaagacgacattgtcatgataggctcctactacgccttgaatccggtattgcgggaaaagattctcgaactgctcgaccaggcgcgcgagaaaaaagctattatctactatgaccccaacttccgttcttcacacaaaaacgaagcgatgaaactcgctcccaccattatcgagaatttggaatattcggatattgtacgaggctcattggaggactttttctatatgtacggcatgcaggacgcggacaaaatatacaaggataaaatcaaattttactgtcctcggtttatctgtactgcgggaggagaaaaagtatcactccgtacaaatttagttaataaagattatccgatagaaccattggaagctgtcagtaccattggagcaggtgacaacttcaatgccgggctgatctacggattacttaaatacgacgtcagatatcgtgatttgaacaacctgaacgaagcaacctgggataaggttatccagtgcggaaaagactttgccgcagaagtctgccggagtttcagcaactccgtatccgtagaatttgcggaaagctataaataatacccgcgaaatagaatagcggtacaatattttattaactgataaatgatagttgattcaactatattgactatctttgcacccgaaataaaagatatacagagatttaatgaagacatttgaagagcttggcgtttctccggagatacgtagagcaattgaagaaatgggatacgagaatcccatgccggtacaagaggaagtgattccgtaccttttaggagaaaataatgatgtagtagctcttgcacagacaggaacaggtaaaacagccgcattcggcctgcccttgctccaacagattgacgtaaagaacagaattccacaatcgcttatcctctgccctactcgtgagctttgtctccagatagcaggagatttgaacgattattccaaatacattgacgggctgaaagtactcccggtatacggtggttcttctattgacagtcagatacgcagcctgaaacgcggtgtacatatcatcgtggccactcccggacgtttattggacttaatggagcgcaagaccgtatccttgtccactattcgcaacgtggtaatggacgaagcggacgaaatgctgaatatgggatttacggatagtatcaatgctattcttgccgatgttccccaagaacgtaatacgttgcttttctctgcaacaatgagcccggaaattgcgcgtatctcaaagaactatctgcgcaacgctaaagaaatcactatcggccgcaagaatgaaagtaccagcaacgtaaagcacgttgcctataccgttcatgctaaagataagtatgaagcactgaagcgtatcgtagactattatccgcaaatttacggtatcattttctgccgcacacgtaaggaaacacaggaaattgcagataaactgatgcaggaaggttataatgccgactcattgcacggtgaattgtcacaggcacaacgtgacgccgtgatgcagaaattccgtatccgtaacctgcaactgctcgttgctacggacgtagctgcccgcgggctggacgtggacgacctgacacacgtcatcaattacggattgccggatgatacggaaagctatactcaccgtagcggacgtacaggacgtgccggcaagacaggtacttctatcgccattatcaacctgcgtgagaaagggaaaatgcgtgagattgaacgtattatcggcaagaagtttattcccggagaaatgccgactgcagcaggaatttgccagaaacagttacttaaagtaattgacgacctcgagaaagtaaaagtaaacgaagaggagatttctgaattcatgcccgatatttaccgtaaactagaatggttaagtaaggaagacttgattaaacgaatggtttctcacgaatttaaccgctttgccgaatattaccgcaaccgcgcagagatagaagtaccgaccgatagccgtggcgaacgtaccggaagaggtgaccgaaaagaaggtggtttcgaaaaaagaagccggaaagctgctccgggcttcaaccgtttattcattaacttgggcaaaacggacagtttcttccccagtgacctcatcggcttgctgaatagcaatacacgtggacgcattgaattaggacgtatcgacttaatgcagaacttctctttctttgaagttcccgaaaaagaggctatcaatgtcgtaaaagctctaagccgtgcgaaatggaacggacggaaagtcgtagtagaagtatctagtgaagaaggcggaaaaggacatgaaaacggttcaagtgaacgcaaaggcggaaaacgattcggcaaaggagaagatcgcactccacgctacgacaataaagatagaaaaacaaaagatgcttctaccaaaggtccaaaatccggcaaaaaagaaaaaccgagtcgtgcagaacgaggctattcggatgctcgcggtccaaaaaagaaagacgactggcaggaattctttaaagacaaagaaccagacttcagtgaagaagggtgggcacgcagaaaaccaaagaaataaaaactttcaaagcaaaaaccatagaattccccttttgagggaatggttacttcttaaaaaaagttgtaccaaaaacgtttacataaccttttataaggtgagttcaatataaacttaatgattatgcttcccttcctttggaaaggaaggagaagcatgagaatgaagttatatcaaactcaccttatttttaattcttttatcagatttcccgctttcccgtatttctcgataataaagagcatataacgcacatccacaccgatacatcgttgtaaatcgggttcaaatacaatatcactgctcatggcttcccaattgccgtcaaacgccagaccgagcaactctcccttaccgttgaacatggcactgccggagtttcctcctgttatatcattgttggagataaagcagacattcatatctccctgttcattggcatacctgccgaaatcgcgggaagataataaagacaagagttccggctgcacggcaaagtcaatgtctccggcatgctcttttaccttctcaaagatacctttcactgttgtataatagccgtaagtagccccgtcgaaaggagaataaccactgaccgtcccgaaactgagccgcatggtcgaattggcgtcgggatagaaattacggtcggcatacatacggcgcatggcatcattgaataagcgctctccctgttcgatctgctcggaagcttcggaaatactctggttcatctcataatatttcacaatcaggtcaagactcaaagatacggcagggtcttcaatcagattatacgtcgtatcccgttccagaaagcgtttcaaacctttaggcgaggttatattggatgttgcatacaaggagtctacataggcttggatattcccgttatagagcgtgtcgatcttatcgtacatagcgggaagatacttcttgtccactttcgtttgatactctttcagcatggcggcaaagacttccttgtcaatggcagtatccaggttgtcatacttttccaacagcttcttcatacggcttaccacttgcttttcttccgcctcaaagtcgaagttcagaatttcaagcgcaagctgaaccaattcaggaccattgataaatgcttcaccgaaataagccaaggcacggtttatctcacgacgattgccataattcagctccagggaagagaataaacggataagtttctccctttcttcgggatgcgcctgaatccattcgcgcagtgcagcctcagcagcacgtttcttttccagcactttcaggtgttggatcgctttattggttccgatactattcttccagtaattagagctttcatcgtactttgaggcatacttgatacggatgtccggacgacggtccatttcccgcttccaaatagcctgtttcactccacgcacgtcaatcatagcctgattgatgccgttcatcatctcctcgataccatacgaagagagataacgctccgtactccccggataaccgagcgtcatacagaaagagccttccttatatccttccaaagagacaggagctacatattcgggatgatagggcacattgtccggagaataatccgccggaccgttctgagtgttcgcatagatacggaatacgctgaaatcgcccgtatgacgcggccacatccagttgtccgtatcccacccgaacttaccgacagaggaagggggagcaaataccaggcggacatcattataatcacggtaaacagacagccagaactcatttcccgcatagtaggcgtcaacaatacccgtcaacgtggagtccttttccgatacttccatcccgattacattcatcacagaatcgactgccacccgccgctcggattccgtcttggcgtgtttggcggcagacaatacccgcttggtcacattttccgtacgaagcaggaaacggacatataactcgggattcggcagttcttcttcgaggctacgggccacaaaaccgtctttcagataatcatgttctaccgaagaatgctgctggatactactgaaaccgcaatgatgattggtgaacaccaacccgtcttccgatacgactactcccgaacaaaagccgccgaaactgacaacggcatccgccagacacggcttcttcggattatataatttatttacaggcatctgcaaaccaagttctctcattacccggtctgtttgcttattcttcttaagatttcccaatagccacattccctcatcggcaaaagcattcgacaagcaaagagcaaggacaataactgcggtcagtctgaatttcatgctattatttttagattctttattcggtaatcaacctcaactttttcgcccctacccgggctttcagccactcgctgattttctctttctccgtattcgtcggatgtttggcaaacttcatgacagccagcgtcaccgtatccgttttcatcgaatctacccgtacttcgagcgagtgagcaatggaaagcgtagtgatagaaggataaagcaccttcagttccggcaccagtgtacgactcatttcatcatacgatttatattgttggagagttgtctccagttgagttattttgactttctgttcctgaagccgttgttcgctgttcttgtagaagtcttccattaccatggcacggatagaagacacatccaccgcttcgttgttcataccctgcaatactatcagcttggtatcttcaagtttatactctttcagtttactgcgggctatggagatcgaagcgtccggcacttccgagccgatcaggacaacacggacttccttatgttcatagctgacctttttatcaagcacttgcgtattctcgaatcccaactgttcgttgataaaccggttggccgccgcttcatagaaagtacttttgataatgccgaatgtcagataaacagccgggcacatcgtcagaatcacaatcaggatgatatatttacgcaccgtcttttcacggtttttatcaacgaactctttccgctggaaatgcatcacacgcacgccgataaaagttgcgaggctaatgaatacggaatttatgaagtagaggtaaaaggctcccagaaaatagatcagattaccggaagccagcccgtaacctgccgtacaaagcggcggcatcaatgccgtagcgatagcgacacccggaatcacgttccctttttctttcgtagaaagagccaccacacctgccagaccaccgaaaagtgcgatgaatacgtcataaattgtcggcgatgtgcgggccagcaactctgactgcgaaccagcaataggcgccagaaggaagaagattgtcgccgtcgtcacactgaaagcggtcgtaataagaaaactctttaaagaacgtttcatcagttcgaagtcgttcaagccgacagaaagccctactcccatgataggccccatcaacggagaaatcaacatggcaccgatgatcacggcggtagagttcacattcaagccaagtgacgccatgaaaatggcaaagataagaatccacaggttcgcccccttgaactccacacctttacggatagaatcaactgttgccagttcattatccttatcctttctcaaatccagatattcgcctaaaaaggactttatggcgaatttattacgttcatctgtcttcataagttatttcttctttataaatcgattaataacaggtagctgacttaacggcaaatctttcttgacgatgtatgctacaaacaacaataaaagcacagtacggaaagccagacggagcacaagatcagaaatcggcacttgttcgccgattacatacagtaccgcagcaagcaggatataaagccccagacttttcaagtcatactgaatcggatacttcttctgtcccatccaataggacaacagcataatcaccccatatccggcaacagaagcccacgcagaagcaatataaccatacacaggcacaaacacaatgttcatcaccacaataatggcacatcctatcagtgagaaataagccccccaacgtgtttcatccgtcagtttataccaaaaggaaagattgaaatagattcccttacatatttctgcaagcatcacaacagccactactcccagcccttcccaatatcctcttgccaccagatagcgcaacaaatccaaatagaacatcacggcaaggaaagccaacaatgagaagataaggaaatatttcattgcagccgcatacattttacgattgtccccttctctgtcctttccaaaaacaaagggttcgtatgcataacggaaagcctgcgtaaacatagccattaccatagcaatcttactggtagccgcataaatgcccaactggaccaatccttcctgacgatcctcgaaaagaaacggataaatcatcttatccaccgtctgattcagaataccgaccagccccagaatcaacaccgggaaagaatatactaccattcgttttagcagtgccttgtccaacttataagcaaagcctctcaattcaggaataaagaagaacatctgcactgccgaaataatcagattactgatgaaaatataacctaccagataatccggatcataaaaccaggaaaccgttgccggaaaatgaacattcagccacggacagagcaacagaaagaacagattcaagccaattccaccgataatggaaagcaatttaatagccgcaaacttaatcggtcttttcttataacgtaagtaggcgaaaggaatgcactggaaagaatccaaagccaccaccatagccatcatcgctataaactcgggatgattgccataatccagcagattggcgatcggttgcaggaacagtagacagagaaggacgaaaatcatggataccccgcctactgaaagcaaagagtttgcatacactttcatcggatcttcccctgatttattggcaaagcggaagaaacccgtttccataccgaacgtgagcagcacgagcatcaaagctgtaaatgcatagacatttgatactactccatagcctccggaagaagccggtaaaactgctgtgtacaacggtaccagcatataattgaggaatcgaccgacaatactactcaatccataaatcgcagtatcttttgctaatgatttcagtccagccatgttctattttatcagattaatgatatcacccaaattgattaaaagtcggtagtatctccattctcctccttcgggaaggaggagtacccgtagggggaggtggtaggattttctctcctttttttcacaacctcccgaatctcctccacaatccgcgtaggattctcaaatacgactctattctcaaaacgtattacccaaatatttttctcattgacgagaaaacgtgcacgattatcagcataatccatagcttccgtagtagaatgtacttcaccgtccaactctatccccagccggaattgcgggcaataaaagtctaaaatataaggaccgacactatgctgccgacgaaacttaagtccatctatttgctgccctttgattaacttccagagagtggcttcggcagaagtactcatatttcttaaatcttttcgaacggattttagttcgggcttattcattatatcgtgcatagataattgttttatgtattcacctaccacctccccctacgggtactcctccttcccgaaggaggagaatggagatactaccgactttttactttaatcaattccggtgaaatggtaccgcccactatcagtcgttaaacaatgttttctgactgttataaaggcttcttcccaaatgtttgtaggcaagttcggtcacctcacgtccgcgaggagtacgcttcatgaatccttcttttatcaggaagggttcgtaaacttcctcaatcgtccccgcatcttcccccaaagccgtagcaatggtagtgattcccacaggaccgcccttaaacttgtctataatcgtacaaagtatcttgttgtctatctcatccagaccgtacttgtcaatattcaatgcctccagtgcaaactgggctatttccgtgtcaatagaaccggaacccttcacctgtgcaaagtcgcgcacccggcggagcaaggcattggcaatacgcggcgtcccacggctgcgggaagcaatctctcctgccgcacgcaacgagcaaggcacatccaatatggaagcggaacgacggataatgttactcaagatatcatcatcatagtattccagatgcagattgattccgaaacgtgcacggagcggtgccgtcagcagaccgctgcgtgttgttgcgccaaccagcgtgaaaggattcagatctatctggatgctacgtgccgaaggccctttatcaatcatgatatcaatgcgatagtcttccatggcagaataaagatattcttccaccacgggcgacaagcgatgaatttcatcaataaagagtacatcattcggttcgagactggtcagcacacctgccaaatctcccggtttatcgagcaccggaccggaggttaccttaaagccgactcccaactcgttggcaatgatatttgaaagcgttgtttttcccaatccgggaggtccgtgcagcaggacatggtcgagtgcttcgccacgcaagcgtgccgccttcacaaagatgcgaaggttttccaccaccttatcctgtccgctaaagtcctcaaaactcaacggccggagtgcattctcaaaatcccgttcccttgaagtaagctgatgttcgcgtatgttaaaatcttcttgttccatttatttcttgaaagtaggagacaaagatagagatttacattcattttcagtacaagaaaaacgaataaaaactccgggcacgctctgaatggcagctatcggaaggctatttataaagatttaagagaatatagggccaaccttgtgccaacgtattggcacagccatgccaccctgttggcactatcgtgccactgcgatggcacagttgtgccagcggggaagcactgtctgtgcaacgaagtcttcatctatgacgtgtcgggagacaaccttttatcctgttattagtttatttgaaacgtaataactacttttgcatcatctatatacacgctatcaactatggttttaaattacatctggataggattctttgtcgtcgcctttattatcgcccttataaaagtaattttcctgggagatacggagatatttacgactatcatgaactctacattcgattcgtcaaagacagctttcgaaatctcgttgggacttacgggagtattggccctctggctgggtatcatgaaagtcggagagaacagcggactgattaatgctctggcacgtttcctgagtccggtactctgccggttgtttccggatatacctaaaggacatccggtgttaggctctatctttatgaatatgtccgccaatatgctcggactggacaatgccgccaccccgttgggactaaaagcgatgaaagaattgcaagagttgaatccgaaaaaagataccgcttccaatccgatgattatgtttctggtgattaatacttccggcctcatcatcatcccgatcagtatcatggtttaccgggcacaaatgggagctgcccagcctacggatgtatttattcctattctgttaagtaccttcatttccactctggtcggggtcatagcagtcagtatcgcccagaagataaacctgatcaataagcccattctgattttaatgggtatcatctgtcttttcttctccggtttgatttacctgttcctaagtgtttctcgggaagatatgggcacttactctaccctgatagcgaatattcttctgttcagtgtcattatcctgtttattttaacgggtgtcagaaagaagattaacgtatatgattctttcgtggaaggagccaaggaagggtttacgacagctgtgcgcattattccttatctggttgcttttctggtaggcattgcggtattccgcacttcgggagccatggattttctggtgggaggtatcggatacgcagtaggactatgcggagtcgacacaagctttgtgggagcactgcccactgcattgatgaaatcgcttagcggcagcggtgccaacgggttgatgattgatacaatgaaggaactggggccggattcgtttgtaggacgcatgagttgcgtggtacgcggggcgtcggataccacattctatatccttgccgtttacttcggcagcgtaggtatcaccaagacccgcaacgccgtcacctgtggcctgatagccgacttctcgggtatcatagccgctatcttaatcagttatttatttttcttttaaatcataacattcaattatggctgtaacttatcaaacagaaggcatcaaaatgcctgaaatcaagaaacgcgagactacggaatggatcaaagccgtagctgcttcctatggaaaaagactcggtgaaatcgcttatattttctgttccgatgaaaaaattctggaagtaaaccgccaatatctgcaacacgactactacacggacatcattactttcgactattgtgagggcgaccgcctgtccggagacttgttcatcagcttggatacggtacgcaccaatgcagaacaattcggcgcttcttatgacaatgaactccaccgtgtcattattcacgggatacttcatctttgcggtataaacgataaaggccccggagaacgggaaattatggaagcggcggaaaataaggcgttggcaatgctacactaaataccagactttctcaatcatcctctataaatgaaaaaacgccctatcgtaatcactacgacagggcattttcattagccttcgctaattaacattaaattatttaagagagagatttattacttcttgtcgggagccacttccgaagtgactaacttcttgatagacttggtattcagatacaggaaagccaaccgtggaggtccgtcctgcgcaaccaattccaatgaatcaggtgttatgtaacctatacgttcacgtgtcttatacacttccacctttccatcttctcctttgctaaacccttcaacgattaaataaccatctttatcaatcttccaagtcttcaaatccaaagagggaatattgacggcagagcatttcccaccttttttaaactcaaatcctttcagttcaccggtagactgataggtataaggattgcaccatttacctataatttgtttctccaccttcttctgtccatagctgctgaatgcaaagcaagacagagccataactgtcattaatagtttcttcatttcatttatttttctagtaaatcatatttttggtcaatgccacgttccctcagatgaataccctctttcatccaacgcggttcttttgttcctttcaggtaatagtcgaagaattgcatcatccggatagtccagtccttctgggcagcctgattactaaggaaatgtccttcacctttgtagttgagatgccatgccggacgctgtaaacggcgcatagccaaatacaaggcacgcccctgttcataagccacagcctcatctttgtcattatgccagatcagtaacggcgtatgtatcttatcggcctctatgatagcggagtttgccagatatttgtccttggcttcccacaaattctttcccatacggctttgccattcttcgtacatgaaataacgcggtaaaccgcttccaccacgaatgcccaaataaccggtcaccatatcagtgataggagcaccaatattggcacaagtaaatagatcagttttagtcaccagataactggtttggaatcccgaccagctatgtccttgcagacctatctttcccggatgtgctatcccctgctctatcaaatatttggttccgcttactacggcatcataacaactctgtcccggtgttcctatagtgaaatgcacatccggcatgaatacgatatatccgttgctgacgaaatacatcacatcacccattgcgctgctcaacatcggagcatgataagtattcaatccacctgaatgcgtttcatagaattgtaccagtacgggatattctttttgaggatcataatcttccggcagataaagtattcccttattgggtttattctcatagtttgtccattccaccaactttgcagttccccatttgtattcactttgctgaggattagcattcgttatacggatcggatcggagaaatcggctttgctccaccacagatcacggaattctgacatattctgacgattccagatgcaatacttttgattatccgagaaacgatgaatcgcatagatataaggaccttccgcaagcttcttcaaacgacctttcatgtcaagcgaataaatgccttcatccatcgtattctcatcccacacactgactacaaccgtctcgtccggtttgaaaacttccttatcaatattgctggtcattttacggatagatctcttatttttgcggccatatcccttggtgaaacattccggctgacgttctccggttaaatctatcttccaccagtcataagcatcgtaaatcagtacattattaccatcagcagtccaacctgcaatgccataggcaggcgcaggattcggtttatcataagtttcctcgaataccggataaccaatagctgttgaaatatcggtaaccttacccgttgttccgtcaaacttattccatacctgtgcaacaggatcatacatcacagcccatttaccgttcattgaccacttcggtcttgtccgatagctacgtcctaccaattgcttttttcctgtatgcacattcacagaatagatatcaaacggcacttcattaagccattctttctgcatacgatagggagtttcgtccgtataaagcacataatgtatttcttctgcacggtccggttccaacaaatcagcatgaccgggagctacttccatcaattttccggaagcaatatcatagatatattttgaatattgaggacggaaataacgaccacgagtctgcaacgtaggaacttcatattcatcccaagtccacagctccagttcgaaactcttatccggctttacttcctcttcttttttatctttatttactttctcctgataaggtctgagttccattgtcaggaacttctgactgtgcgacagagtggcccgcgcaagttccattcctgccggtagaatcacctctttacggtcgaagaccaaatcgcaggtattcttctttaaagagaaattataccatagcgaatccttaatactgaattctcctgtcatcagttttgtatccaaactgaaagaaacaggttctttctttacagcactctgatagatagtctgatagggtcccgtcaatgggccataacacaatgcgtttccttttgcctgcctgcgtacaaaaatgatagaacgtccttcattgtacaaggtataataaccaatactgtcaatctgaaaagcagtaccgattttcagatggcgaaccaccaaacgattaaaagacgggacatgattgaccgtatctttcggaacgtttgtcactgagactgaataaggagttccatttaccggccggaaagattccttatatttccattctttcttgatacctgaaggaagttccatcaggatcgtcttcatatttcctgtagagtcagccttctgataagaaagagcttgatccgaattataaaactcaatgttttccacatcatccagcagaatctccttgcgggtacgtgtatcaaacagatgtacagtttttgcgtcggtgttttcaggattgtactccataggtgcaatccggtaggtaacccaacgtcctgtcggggagatatccggcgattcaacacgcttccacgacatgcaggcttcaatgtcaaccggcttcttctgtgtttgagcatcgacactcgggacaaaaccggctaacactcccactattaatccgattcccattattgtctgcttcattttatcttctcctttcatcttttatcatatctttattcaaatcaatatcacagtctgccgagttatcatgtaacaacagacgtgcaaaatgacgccacattttatgctcaaaaaagttctcggactcaccgaagaatccatgagtacatttaggtaacacaaacatatcaaagtccttgtccgctttaatcaatgcatctaccagacgtaaagtattggccggattcacagtctggtctatggcaccggtaaacagcagcaatccatgtttgtaattcttcgccaactcctgattcggacgcacacgtacactataatcatacgttttgctctctactcccaaactgtctttagtcgttgtcaccttctcatctacaccataatgaatctccacgaaacctttattgtaaatacgattgtcatggttaccggccgatgagacagcagccgaataaaagtccggataagtgcaaatagcggcagccgacataaatccgccgcctgaatgaccgtaaatacctaccttggtagcatctataaagggataacgggcagccagttgttcgatagcatatttatcatccgccagcggataatcgcgcatattattgtatccataggtatgataagcctttccacgcattggagtaccccctctgtggcctacggtaattacaatgaatcccagttgagccaaacgggtgttataaacatcatttattgtgaaacgagtcggcacgtactcgaagaacggccccggataaacatttgaaataatagggtaaactttcgtcgaatcaaaatcggcgggcttccacatcacaccataaaggtcggttactccgtcggcagcttttactttaaaacgttccggagctttccagcccatttcatagacaggttgcaagtccggtttctccaatgtcatgattaccttcccattccggttgcgaaccacgtttaccggctcctgcgacacggtagaatatgaatctaccagatagcgacaggagggagagatactgacttcgtgcgacgcattctccggcgtcaacagacggagtgcattcggacgatccaaatgagcttcataaagaatatagtaataagggtcaattcctttctcccgtccataaccatagaaatacatcttgcgtccgacagtatcaatctgcgcaaccgggccggctacccaagtaccgtctgtcagttgattcttcaggtttcctgttgctgtatcatacagataataatgtccccaaccgttacgttcggaacggaacaggatttcttttccgtcattcaggaaagaaacattacgcatctgataatcgagatacggcttgttttcttcatgaatcaccacacgcacttttccggtctctacatccacttcgcaaatatccgactggttccatgtacggttatagcgttggaagtacaaacgttttccgtcttttgacgcatacaatacatcaatatactgatccggccaacgattgatatccaccttcttaacttcccgcttgtctatatctcccaacagtaattcatattgagtcacatttttatcaccggccaattcagctttataagtgatcagttcaggagaaggcttggataaagaattaataacccacaagtcacggactttccggttgtcttcacggacagcgtagaaacggtggcttcccggaatccagtgagccgattcggctccgaaacggccttccatcttgccttcgtcttcacggttgaatgtataatccggcataccgtccgtcgtcaattgaaccgggattgtatcctgtccctttttcgggtttccaacgaaatacaagttatccttactggcataaagaaaatacaagctatccggagaatatttcatccaatacgggtcgccggttttatacgtcggcttctcatcgagttgcttcaattcttttgtatggatattgtatgtataaagtccgcggtcaaaatcaatacgaatggtttcgttgtccttcataaatgtgaaagacaaatgcggatctgccgaagaataggctttcttggtatatactgcaattttgctcaataactcatccgtatcaaacaacaatcgtttctccttcttcttcggattaacataataatatttctttccttcacgtgttgtaaaagagtaataaaagcaatccgtatcgttgataaacgtcggtctgacttctgtagaatacttatctataggattttgctccaacaaacggaacttttccgctaactgataattcgctttttgttgcgcaccggcaaggttgcatgatactaatgcaaccaccaggcacaaatatctaaagagagagtttttcataaaatcttatctattgtcttatttactacggttaatatctccccaatagtctgcacgggtatcacctagcaaatgtttggcaaagaaacggtacattttcttctcaaaatactcatcggcagagccatatccatgaccggctccgggaatgacaagcatatcgaaatccttaccggcctcaatcaaagcctgagccatacggtatgtatgtgcaggattcacgttcttatccatatctccggttacaagcatcaagtgtcctttcagattcttggctatctctgcattcgactttactctaaacttgtattcatattctttggtctcgttacccagactgtctttcaccaccttctctacttctcttacaccattgtaacattctccccaaccacggttatagatactattatcatggtttccggaacaagaaacggcagccttataaaagtccggataagtgcagatagcagccgcagccataaatccgccaccggaatgtccgtagataccaactttcttaccgtcaataaacgagtggcgctgagccaactgctcaatagcatacttatcatcttccaacggataatcacgcatattgccgtaaccgtaacggtgatatgcctttccacgcatcggagtatctcccctatggcctacagtgattacaataaagccaagctgcgccatacgggtacaatagctatcatccaacgtaaagttagtaggaacgaacccgaagtatggtcccggataaacaaccgaaataatcggatatttcttttccggatcaaaattagacggcttccacatcactccatacaaatccgtaacattatcggcagctttcaccacaaaattttccggcttcttccaaccggcggcatatactaagtcaagatcaggttttgccaattccataatcactttaccctttctatctttcaacatgattttgggttccatgtctactctactataagtatcaacataataattatgagatttcaagaaactcacattatgttgtccgtcttccgtacttaatggggtcactccttctttatcaatatcaacttcatacagcatataataaaaaggattaaccttcttatcttttccatatccgtacaaataaaccttacgtttcaatgtatcaatcgagttaatataacctgttacccattcaccagaagtcattgtatttttgagatttccatctctatcgtaatgataataatgtccccaacctgtacgttctgaacgaaacagtatatcctttccatcattcaggattgcaacattacgagcatgcggatcacgatatggcttatcttcctcatgaataatttcctttacttccaaagtagaaagattaactgagcatacatccacctcatcccaagtacgtttcgttcgctcaaagaataaatatttactatcagaagtgacatataaaggcataacatattgatcttgccatttgtctatttcagcctttttggcagtcttttctattatatcaataattgtcaaatcattctgagtcacatatttgtcacccgggaactcatacttatacgactttaatgaaggatagtcgctcaaagaattaataacccaaaagttacgtagcttacggttatcatcacgtacagcatatatatgccgattatccgggcaccaacgtgccaatgtaggcatctctccctcttctccaggttcataatcatcatcgcgtgcataagaaaagtctttcataccatcgacggtcaactgcacttcggttgtatctacccctaatgctttatttccctttatgtataaattatgattcttagcatacaaaatatatttcttattaggagagaaattcatccatgtataggtcggttctaacgactctttattttcttctttcttctcaaacagcgtcaatttatccgtcaagcgattatagctatattgtttacccttataatcaaacacaaacgaacgttggtctttagaaaaagtaacagatgatatgtccaatttatttttatctactacacctttggtgaattcgctcaactgcatagccattttccccttatcaaaaagaggttcacgttttcctgcagcaggcatcacataataatattctttaccaactgtcgtttgaaactcaaaccaaaaattatctgtatcattaatttcccgtggatatatcgatagactattatgagataatttacctcctaaagtaaaatccctcaaatccgcaactacgcgcctaatatgatacagaagcgaaaagaatctgcatcgttagtaaaaagggggcacagtgcatcgaatgtcaccataaagacatataaatgccccttaccccaccatgcgacttgaggcaatacgcaaaatcacgactataagttgtcggtgttatccaaagtcattctggaacacattggcataagcattgttgcatgaatagatattcagcacatacttccttgatgtcctgacccatttggctggcacagagatgaacttaaagacaaacgtcttgatgcggcttgttgctttgagtccgaacctcttcacgtcaagcctcgccatgatgaatttatagaagttgcgtatgagtgccataagcagaagaaacaccgtgttttctcccataaaggattttggaagcctgttccagccgaatccgttattcatatcatcgaagatgcgttccttccctccacggaggttatagaattcgacaatctctttctcggaagactcgtagtcatttgtaaggatgcagcggtaggtgtattctccttcccacaggtcgagttcgccgtctatccgcttctgtctttgaatcacaagacggtatgccttccctttccatttctcgatgagaatggaggccagctcaaactcaatgccgcccaattccactttcttccaacctctgagggcaaagatgtcattgtagagcgaactgcatcggttagcacggatatagaaggtcttgcagtgtttagcaatctcttccactatctcttcagaacacgagccgcaatcagctctgaaacggttgataataagcttgttttgttcaaacctttcaaagaacctcttcagcgtgtccttctggtggaaacggacatttgtgttgccgtcgctgttctcaatgccgacaatcaagttgccaataaccgccacgccagggcgataaccaaggaacttcttgtatgtaggcttcgcatcaaacttctcagcctctatgaactggtggtcgaagtcaacgtcatacccctcgccctctttcagctgccctgtggacaataggcaattgaggagcagtgtattcagcttgtctgccgtgttgaagtcgtaggtcttgccagtgtcggatgtgtaggaaatgttatcctgggtcagttcctttatggctctaagaatcgtgtcggcactgcatgtgcgaagtgtcggatgaagcgaaaggtggtacatcagatgagtggtgacatcctcgatgcatgagccgccacaaaaataaacgctcataagcgaacggatgatttcgctgtattgataaccatacagcctgcatctcataccgagggttgagtcgattacagatgagagtctggagtcaaattgctccattattgaaaatattcctccaaaaggagtgagtttctcggatttaattgctacctttgccatgtctgtcgggtttgatacatattttgatttgcaacactaagataggtgaaaaatctgacatggcaaattcctgagcaactttttgttgctcaggtacttaaaaagttatatttgtaatagtgttgcggaattaaggaaatcataaaacttctgtgccaattcataattagcttgctgctgagaaaaccccaactgaaaactccaatacattgacagtatagtaaacaatattttcttattcatacacaagtttagttatcataaagataggcccacgcttttcaacgtgagcctggtattataaaaagattctattggaaagtataagtaaacactccactagcattaccaaacttatacaaagtatccactatttttccaaagttattattatccttatcctctgtttccggacttggataaagctgattcacggttatattgtccaacactttatcctcctctactacctcataaataaagaaatcaccattttctaatgcaacccctaaatgaccattatggtatatatcaccgtcccttgtatactcttctacatcatgactggatatagaaactatattttgatcaaactttttcaacaatacagcattactagtagagccgccatatgggcaataccatatctcctttccactggcaaatacaacatactttttatgttggaatacagccatatcaacataacctgctgcaaacactctagcatcaaccggaacctctttaaagtcagtgacagtcactatacccccacttgtatctccctcaagtccaaaatagcgcatactatatgtacctttttcttccattaacgcaagccatttaggaacaatatatgaatctgtcacatcaaaacgattatcacgtccgcaggttgcaggtatcattgctatgacatttttgctcatttgtttaaaatgcttctcatccgtattctctgtgagctcaacaatatttccatcgtttctagatgaattctcagtgattgcagaaggagttccgtcaagagaatattcattataacgacctgcatcccaaataccgaccaaagaattgtcctctgtacaagcaggaattacataataattacgattgtataatttatgagcctgatataatcccttaaactttgtactatttgctaatggtaccgaaatatatgaacctgcatgatagtcattagccaatacttttctatgcaaatatataaacccatttttatctctaattagctttgaagaaaatgtcatcgctgcttctaccggttcaaagttttcaggaaggtcatttccaaactcttcctttgtataaacttcatgctccatcgtatttccattcagttcaacccaattatcctttccttgcataaccacgatctcatcatatacagcatccgaaaagccaaaatcatattccactccaatatgctccattaatcctttcggctctgtccccaagtcaggacgaaaatacttttcaacatcatagaatataatagaatcacgctcaacaggattcccctccgcatcaatatcatcacgcttcaccgttctcatttttataaaggaaagagcggattttccgtccttttccgatagtattaaccagccaaccaaataaggagaacgcaccgttatttccgctgatttagaaaacttcacacctgttttattatccacaactgaatatgtcacttcatacttacctgtttttgctgcattaaatgtataatcaggagtctttacatctagcagttccccatctaaataccactcataactcacatccggatgaatactatcaattgtaaatttaaatgtaggttttaaatacagatcctcttccacagatactgtataccatccattcatattctcaatcgatccattcaactcattgatttgcctataattaaaatcatttttatcatccaaacagctactgatacaacatagcaataagaataatacagtatataataatatccttttcataattatttcctttcttttatccagcaataggaacttctattatcactccgttctcgtcacgcagccacttatctttcggcttatctccattaatattcttcaaggtattctttaaacgtagagaatatttacgtaggatattcatatccttaccatcgaaaacaacatcatctttcttcaattcatctagaaacattaaatatttcgtctctgaatatactcccaaataatattcttcggcaatattaaatcggtcatctacattgcctatattaccgacagaccaccaaacaggcttaaagattctatcagtcacagagattatagctctagtaaatttagcggttccttcacgtacttcaccttcttcattaacttttaaagccagcaacttggtattttcttttaatatgtcatagttttttagagtaataataatctcacctttcaattcaccggctttgattacgcatttttcaggcaattcaaattgagattcaggtaaagtagtacgaaccggatcaaatcctaatgagaatgtcaaatcattctcctgcaatttaccatataccttgacgcctaatgctattttagcatcttctccttcatcataaaacttgaaagatacagctgtggtatcagttgtcatatctttatcaaagatgacataagagacatcattcgcatttgtcaataagtcattctgttcgcaagaaaaaaacgagcatatcagacaaatagtaattattgtataaagaaattttcttttcatatcatttccatttttcattatcttaaatattactttctgaatcaggcagaggcaataccatattttcctctttagcttccacttctttccaactatacccttccatccccaacaggttcttttttagacgtttatacataaaaaaggtttgaccttcacctacaaactcacgacgggcatcactaacaatcatattgataaattcttcctcagatgtcacttgggaataatcaacatttttaataccccttcctttttttactgatgaaaggtatttttgagctaaggcaggatctgttttataaattgcctcagcagcaatataatatacctcagacatacggatcattggtatcatctcatcatttaccttgctatatgtagttccttctttttgtttattatactttaaggtgcgataataataatcatagtatttaccttccaactgatatatcagacgccagtctgatgatttctccgaaccaaaaaactcattcaccaattcatcgcctaaacataaataatgttcattatattcatctgccggattatctgataaatgatttattttttgatcccaatcagtcaaatctgtcgaatacaaagaaaaaataatatcctccatcatcttcatatttcctttgttaaaaccagaagaactggtagaagcagcaaaccatttctttgactccaccacatcgattacttttttagcttctgcataagcctcatcagccttttgggcatacaaatagacacgcgctagctctgcagtaacagcataataattcatcctataacctctatagcctaaaaagcgtgactcaccattataactctgaataaaacgactctccatactgaaacttgcagatttatctactgacagcaaaatggattgagctttcttcaaatcatcaattatatgttgcaaacagtaactgacagtctgtctatcactcaaatacgacggatatttgtcaacataaggaataaaagtacgctcaccaggattcatgagcaaagaaggagcataaattcgcaataaatcaaaatgcatatatgctcgtaatgcaatcgcttcagcaaatatcatatctcgttcatgagtccgatcataaaacaacagagtatcttcattttcaacttgctgagctaaattattacaattagcaataatattccacgctgcgtcccacattgcatctgtagtcggagtcaattccgaatgtttaaatgaaaaagttgctatttttttcattgctcttccaccaccatcatcaggagccttatctaaattatagactaacccccatccgtcaatcagtccccaacttaaattgctgccatacaaatcgaacgttgccagtttccggtaaataccatttagagcagtacggtaaccatttcctgtttcaaacaaatattcttcttttatctcgtccgatggccgcacatccaaccaatcgttacaggaggacataaataagcttataaagccaactataaataatgtattatatattcttttcatctctatttccttttaaaattgtgctttcacagagaactctactttccaagatctcggataactcaagccacgttcttgcttgatagatgtccagttcaataagtcgcttgtagatgcttctaaacgaagcaaattcatatgaagatgcttcttcagccactcacgatcgaaatcataactgagtgtcaaactattcaggcgaacgactgctttatcttgtacaaatcgagaagttggcaacgttgtaagacttctatccttaatatctttgaattgagcaatatcgccaggtttctgccatctatcagttaagacacgcaggtcaacattcctatttgccaaatctgcattttccacattatctaccagagtttggttgtactcctgtccaccccattcatacaagaaagaagcaaacaatgtccaatttttatatgacatattcacaccaaatgcaccattacatttcggttctgtatttcctactacaacttcttgtgtagcatcccatttatcagcaacagtgccatctctattcaaaaagatttccttacctgttgtagggtcaatccctagagaacgtacagcccaaattgaagttaacgacgctccttctgcatactgcggaataggaacagaataatttgcatcatccaatgaagaacctgtcaattcttggttaaaagcttctttcttataaaactctgcaactctttgattataggccttctgagaatccgatatttttagaatctcattcttattgtgtgccatatttccccataaagagacattccagtttctatcacgatatatatccgcacgtacttctacttccactcccttgtttactacttcacccatattatctttataagtcgaaaaaccggaagtatgagaaagcgtaacatcatttacaagatcaatagttttatcatagtagtactcaaaatctatagtcaaacgtttattcaatgtttgagtttcgataccaatattgaacttatctgttttctcccaagtcaaatccttgtttcccaatgctttcaaaactgctccatatcctgttttataccattcatcaaataatgcttcataaacagtagaagctgcataaggagcaaaattgaccttacccgtacgtccataagagcctcgaaccttcaatttattgatatatggattagtctttaaaaaatcatagttatgaatattcacccctaaacctccagaaaagaaaggtgcccatttttgattagttccgaattcggaagaaccatcaaaacgtacagaaaggtcagctaaataaatatcattataagtatagttggaagaggcaatcgcactaaccatacgagttgtattttcggaacgagtcggctttttataaatctctgccgcataatttaatgaatggaattctcctgaaggaaaaccacgataatgcgcgttcgtattttctgttgtaccggaagaagcctcccaacctaaagatacattcagattatgtttttctttaaatgtacgggtataataaaggaatgcattagcattccaattaatgctttctccctttgtagtatataggtcaccggaaagattcttatcatctgtcccatacacgcttgttttactagacaacggatctatgaatttctctgcttttgagtattgctttgttacactaaattgtcctttaacagtccaataattatctatgtaccagttaaaactcaaattatcaattaattcatcataggcattccaatcataattacctaaagtagcttcatacaatggattatttatgtcacggtttgaaggtttagaaaatttcagcccttgtactaacttaccattatcgtcataaggagaatcatagggttgtaaacttgtataatcactaaaggaaccatatggagacgcctttgatttagtatgagtgaaagatacgtaattttttatttgaaagtttttcattctataatctaaagaaaaacctgcactatatcgattacgttctgttcctttcatcaccccatccgacaaattaaaagaaccatctacaccataacgcaaattaggtgtaccaccttctaaataaatactatgtttatgattaaatgaattctgtaaaggcaatgacatccaatccgtatctacccctttctgaattaaagcatactttctataataagcatttaatccggatcctgtatttatattactacctgtaccattttcgaacaatccggctaaacgttctatttccaatttttctgcggcatttgccaagttataatcatgcaaatccggcatttccaaggttcctgtaaaattataagagacacgaacttcacctgctttaggagctactgtagtgataacaactactccatttgcagcacgagatccatacattgcagtcgcagcagcatctttcaatatcgttaaactctcaatacgtgtagggtccaagtcatatattttttcaatgcttacttcaaagccatccataataaaagttggaagatttgggttgttttcgagatttgaacgagatagatctttatccaagtctttaattccaaaccctgaacgcccgcggatatacatttcaggaacagtatttgggtcagaaccaaactgagtattatctactaaacggaaagaagggtcaaatgattgaattgcacctaaaatattcgtctgtgacaccttgcgcaattcatcacctgttatttgcgtagaactacccgtaaagctggatttacgaacattactgtatcccgtaacgactacatcctccaatgttttcacatcgtccaccatagttatttcaagcatcttcttacgggtagcgtccacctgaagtgtttgttttttcattccgataaaagagacctccaaagtcactttgtcatttttcacatccagcgtaaactcaccttcaatgtttgttgaagtacctgtacgagtacctttcacaataatactggctccgggaatcggttctctattcgaatcaacaaccataccgcgaatacggttttcccgtttttccgcctgcattttgcgaatcaccacaatgccgtccttcaccacataatcaaatccctgaggattaagaatcaacttaagtgcgatctcccatttctcatttttcgcatcaatcgacactggaggcactcctttaaacatttgtgaattatacaacatattcacacctgtttgtttcttcactgcatccaaaacagtctcgatagagacattgtgcagtttcaaagttaccgtcttgtcttgtgacggtaaagcccatgcactaaacgtgcagcacattgccactagaaaacatagcagccatcgtttttctctcataaattaatgattaaacttttgtgtacctaatattctaactattctatattattccaattcttctaccttatcatatatcaatatgttccttccactgattttataagtcagatctcctgtcagttccagtgcatccaggaatgaatttattgttccatagcgtttcaaactaccactataagtaatgtcacgcaaatggggagtctcataataaacctgtatgtcgtaccaacgttcgaatgtctgcattatctctcctaaagggcggttattaaagacatacctcccgtctacccaaccgacatattcatccagatctaccatacgtttttccgaaccgttggcagaaaccacagcctgctcccccggcgaaagaataatagttccgatgcttgatgaagagaactgtacttttccgtgtaccaacgttgtgtaaacagacgcatcggtataagcattgatattgaaggcagtaccaagcacagttacctctccaagatgagtctgcacgatgaacggccgtgtttcgtcttttacgacatcaaaataggcctcgccttccaatgccacaactctccgcttacctgcaaaacgtaccggataagttagtttggagccggcattcaaatgaacagtagttccatccgccaggattacggtattttcacccccacgcggtataaccaactcattggatttaaccggtttttcttcggtactttcttcctcatgttgtgttgtaacggttggttgataagacagtactcctttcttatattttacttgaacgccatctactaccacattcacttcttttttatccacatcaataatgctaccgtcaggtaacgttaactgcgcctgttgtgtacccggctgaataagaactctcttctcctctactgccgaatagaaattcgacatatagaatgaaaggccggcagccagaactatgacagccgcagcagcataccaccaaacccgggaaatagaaggcttacgttccttcttctccattcgtccgattttctgaaggaaagattgataagctttctttgatgaataatctttatattctccaaatgcagccttcaatgtttcaccattctgcaactgctcatacactttctttaagtccgggcattccgccaatcgtttttcaagctctttccgttctgcttcattcgcttctcccaaaagaaactttctcattaaagcagcatcttgatatatattttcgaacttattcatcttattatctattttttaattaaattgcaatttcatccttgctttattataactatacataactcatagaaaagggtgacaaaaagatgatctttttttggagaaggaatatccaacgagggattttaaagagaaagatatagcattatgctatcaaaatgaagaaatacggtcacatttaacaaagaaaacaaatcttaatcaatcaataaaaagacaaagaagtatcaaattgactttatttctttttagaaaaataaacagagaattatagaatgaatagagtctcccagcttttcacgaagaaatttatagctacggctcttttgagttttaacggtattgatacttatttccagacgttccgctatttcttcccaagtatacccttcgattctcaacagaatgatccggcgttgctcaggcggaagttcttcaatatggaaatacaactgacggatgatctcttctttcactgtcaatgcataaatcatatcctcgtcttgccgacattcttcagcaagggaacttagaatactgtcatgaatctgattattgcgtatatataataaggtattattataacaggcacgataaagataattggtaagctctttaatatcagagaaggtacgcttaccctcccatacggaaataaagacttcctgtaccaaatcttcaactgcatcgggaattggcaatatcttggaaacataaacacatagagcagcataaaaacgatcgtagaaatcgccccacgtcttttcatccttccggttaactcctgctactatggtgtcaattctatcactcatattgtcactctactcatcaaaaaagaatacagaattcgtagaaatcgctataaccacttactatatcgatatttacgaatgcaaatatattgtttttttcaaaaacacagactttaagtagcctacaaaatagaaaataaaaacgttctttctctatataaaaaacacaatatcatctatcacctatcaccggcatcaagcaaaccgtttattcatcgtactttccgacggtgataggttgtttcttaacctatcacccaacctatcacctatcaccaaccattttcaaacaaattagtatataaaaccagccggtatccacctactaaaaatatatcccttagacagggccaacagattataccttggcagcaggtatttcacgccgagaaacaaatagtttcaagtaatggaaaccaaagtttcaaggcttagaaactctagtttcgcaccgttggaactaaagtttcaagccggagaaactactgtttcccttgcagaaacttaaatgtcccaataggaacaactccatgcttatagcatacagcgatataggggtacaaaaaaagagcgaattattccgctccaccattaaagaatccccataaatgggattcttctttttcatcattcatttactcgtttcctgaaaactactttttactaatacctaatcaaaacaacctttttcctaaaaactaatcttaaaatccaataccttaattttataaactaatatcctttaatattaccttgttctaatacctaaaatcttagtagtttcacaactacgctgcaaaggtatagctgttttagaaaacaacaatagttagtatgctaaaaaacatatttccccctatttttttgatttatatcaagaaaacgaggaacgattaggtgtaataaggacatttattattcaaatgaatggaatcacggacagatcttctcttttcacttctatttcatcaaaggaaccgcccatttttctacttacaaaaagatagcaaataaaagattaaatatgcaaaattccagcattccgttccaaaaagcaagtacaaagcaataaataagagataagattgtagacattctgtatatttaaactccaaaattacggcgatttttcgaaccattccggacactcccccgaattttcggaagcaaaaacaactgaaagatacaagtctcgcaacttttccgtaactttgcagcgtttgataataaataagataggaatggattttaagtacgacgttatcgtaatcggtgccggacatgcaggctgtgaagcagcagccgcagcagcaaatttaggttccaagacttgtctcatcacaatggacatgaacaagattggacagatgagttgcaacccggccgtaggaggaatcgccaaaggacaaatagtacgtgagatagatgcactgggtggacaaatgggattggtgacagatgaaacagctattcagttccgaatcttaaatcgttcaaaaggccccgccatgtggagtcctcgtgcccaatgcgaccgcgccaagtttatctggtcatggcgcgagagactggaaaacacccccaaccttcatatttggcaagataccgtatgcgaacttctcgttgaaaacggagaggtgacaggactcgtcaccgtctggggagttactttcaaagcaaagtgcatcgtactgactgcgggaactttcctcaacggactgatgcacgtaggacgccaccaactaccgggtggaagaatggccgaaccggcttcctatcaactgaccgaatctatcgcccgccatgggattacttacggaagaatgaagaccggaactccggtacgtatcgacgcacgcagcgtgcacttcgaccaaatggaaacgcaagacggagaatgtgacttccacaagttctctttcatgaatacaagtacacgtcatttgaaacaactccaatgctggacatgctatacaaatgaagaagtacatcggattttacgtgatggattgccggactctccccttttcaacggacaaattcaaagtatcggcccgcgctattgccccagcatagagaccaagattgtgactttccccgacaaagaccagcatcagcttttcctcgaaccggaaggagaaacgacacaggaattatacctcaacggattctcttcttcgcttccaatggatatacagattgctgccttgaaaaagattcccgctttcaaagacttggttatttatcgtccgggatatgcaattgaatatgactacttcgatccgacacaattaaaacatacgctggaatcgaaagttattaaaaacttgttctttgccggacaagtaaacggaaccaccggctacgaagaggccggaggacaaggagcaatagccggaatcaatgcacacattaattgccatggtggagaagaatttacgttggcacgcgatgaagcatatatcggcgtattaatcgacgatttagttaccaagggagttgacgagccttaccggatgtttacttcacgcgcagaatacaggattctgctccgtatggacgatgcagacatgagacttaccgaacgggcatacaaactcggattagccaaggaagaccgttatcggttgatgaaaagcaagaaggaagctgtggaacagattatttctttcgcacgaaactattcgatgaaaccggcactaattaatgatgcgctcgaaaagataggaacaactcccctacgtcaaggttgcaaattaattgaaatattgaaccgtccgcaggtgacgatagagaacatagccgaacacgttccggcatttcaacgggaactggaaaaagcaacaagtgccaaccaagaccgtaaagaagaaattttggaagctgccgaaatcttaatcaaatatcaaggttatattgacagagagcgaatgatagcagaaaagttggcacgcctggaaagtataaagataaaaggcaagtttgactattcttctatccagtccctatccaccgaagctcgccaaaagctgactaaaatagatccggaaaccattgcccaagcgagccggattccgggagtatcgccaagcgacatcaacgtgttgctggtactttcgggccggtaagcggcaacgtttcacgtgaaacaaagcatttaaagaaacgagataaatcaatgattatgagcaaagaaacgctaattaaaagtatccgggaaattcccgactttccgattccgggaatcctgttttacgatgtaaccacattgttcaaagatccgtggtgcttgcaagaattatcggacgttatgtacgagatgtataaggataaaggtatcaccaaagttgtaggtatagaatcaagaggattcatcatgggaccgattctggctacccgactcaatgctggcttcatccctatccgtaaacccggaaaacttcccgcagaaactattgaagaaagctatgacaaagaatacggaaaagacacagtgcagattcacaaagacgcattggatgaaaacgatgtagtgctgctgcatgacgacttactggcaacgggcggaacaatgaaagcagcctgtgaactggtgaagaaattgaaaccgaagaaagtatatatcaactttatcatcgaactgaaagacctcaacggaaaatcagtattcggagatgatgtagaagtagaatccgtattgactttataaaggatttgtttatatttgcagggcgtagtgatactacgccctttttcattttagctatttcatccctaaagattatgaatacagaagcggaaaacaaaaccaatgaatacttgaaaggaatcgtggcaaaccttcctgaaaagccgggaatctaccagtacctgaatgcggaaggaacgattatatacgttggaaaggctaaaaacctgaagaaaagggtatactcttatttcagcaaagaacacgagccgggaaagacacgggtattggtaagcaagatagctgatatacggtatatcgtggtgaacacagaggaagatgcactgctattggaaaataatctgatcaagaaatataagccgcgttataacgtcttattaaaggatgacaagacttacccttcgatctgtgtacagaacgaatattttcccaggatattcagaacccggaagattatcagaaacggctcatcttattatggtccgtacagccatatcccctcgatgtatgcagtgctggacttgataaagcatttatatccgttacgtacctgttctttaaacctcactccggagaacatacgggccgggaagttcaatgtatgcctcgaatatcatataaagaactgtgcaggaccctgcatcgggcttcagtcacaagaagaatatctaaaaaacatcgatgaaatcaaagagattctaaaagggaatacgcaggaaattagccgtatgctattggagaagatgcagactttggccggtgaaatgaaatttgaggaagcacagaagattaaagagaaatatcttttgatagagaactaccgttccaaatcagaagtggtaagtgccgtactgcataatatagatgtcttttcgatcgaggaggatgacagcaattccgcatttatcaattatctgcatatcacaaacggagcaatcaaccaggcatttactttcgaatataaaaagaagttgaatgaatccaaggaagaattgctgacgctcggcattatcgaaatgagggaacgttataaaagccggtcacgggagattatcgtccccttcgaacttgacctggaattaaataatgtcgttttcaccgttccccaacggggtgataaaaagaaattgctggatctttctatcctgaacgtgaagcaatacaaggccgaccgcatgaaacaggcggagaaactgaatcctgaacagagaagtatgcgcctgatgaaagaaatacagcaagaactgcatttggagagaccgcccttgcagattgaatgttttgataactcgaacatacagggatcggacgcagtggcagcttgcgtggtattcaaaaaggccaaaccttcgaagaaagattaccggaaatacaatataaagacagtagtggggcctgatgattatgcttcgatgaaagaagtcgtaaaaaggcgttatcagcgcgcaattgaagaaagttcgccgttgcccgacctgatcattaccgacggtgggaaagggcaaatggaggtcgtcagagaggtcattgaggacgaactagggttgaatatccctattgccggattggctaaagacaatcgccaccgcacgtctgaattgctattcgggtttcctccgcaaactatcgggatcaaacaacacactcccctgttccggttgctgacacaaatacaggatgaagtacaccgctttgcgattagttttcatcgcgacaaacgtagcaaaagacagattgcatctgcattggatagcatcaaaggcatcggggaaaagactaaaacagctcttttgaaagaatttaagagtgtaaagcggataaaagaggcgtcgctagaggacatcagcgctattattggggaagcgaaggccaagacggtgaaggaaggattgaataatgaataacagaggctaaaagtagaaggtttcaagaggcagtaacacgttcttcttcgataatattttcctcccaatacatcgttttctctttcgaaattcgtaaatttgcctttcataatcacgaaatagaataaatagcaatgcgaatagttatacaacgggtaagccatgcatcagtgaccattgagggacactgcaaatcagctatcggaaaaggaatgctgatattagtcggcattgaggaagccgatgggcaggaagacattgactggctctgcaagaagatagtaaatctgcgcattttcgacgatgagaatggcgtaatgaacaaatccatactggaagacggaggagaaattctggttatcagccagttcactttacatgcttccaccaaaaaagggaaccgtccttcttatatcaaagctgcaaagccggaaatatcggtcccactctatgagaagttctgcaaagatttgactgccgcattgggcaaagaaatcggtacgggtaccttcggtgcagacatgaaagttgaacttttgaacgacggacctgttactatatgcatggatacgaaaaacaaagaataacgtaaacaacttataataaaagaactatgaccctggaagaagctcaaaaacaggtagaccaatgggtaaagacatacggcgtccgctatttcagcgaattgaccaatatggcagtactgacggaagaagtcggggaactggcccgtgtcatggcccgcaaatacggtgaccaatccttcaaggaaggtgagaaagacaatatcgaagaagaaatagcagacgttctgtgggtgctcctatgcatcgccaaccagacaggcgtagacgtcactgccgcccttcaaaagagtatggaaaagaaaacgaaacgagatagtaaaagacatatcaataacccaaaactgaacgatcatggaggagaataattcactgtccaacaagtacgatgccgctctggcgaagtataatacacatctgagcgatgcagatattcaggctcgcgtagctgacctgattgaaaagaaagtgccggagaacaacacggaagaagtcaagaaattcctgttcacgtgcattgacctgactacactgaacagtacggatagcgatgaaagcgttatgcgatttactgaaaaagtaaaccagttcgatgatgaatttcctgacttgaaaaatgtagctgcgatctgcgtgtatcccaactttgcagctatcgtcaagaatacgctggaggtagacggagtgagtatcgcctgtgtatcaggaggatttccttcttctcaaacatttaccgaagtaaaagtagcggaaactgcactggccattgcagacggcgcagacgaaatagatattgtaatctccataggcaagttcctgagtggcgactacgaagcaatgtgtgaggaaatacaggagttgaaggaagtctgcaaggaacgccacctcaaggtaatcctcgaaacgggtgcactaaagagcgcttccaacatcaaaaaagcctctatcctatccatgtattcaggtgcggatttcatcaaaacatcgaccggaaaacagcagcctgcagctactccggaagctgcttatgtgatgtgtgaagctatcaaggaatactatcagaagacaggaaacaagattggcttcaaaccggcaggaggaatcaatacagtcaatgacgcaattatttattacactattgtgaaagaagtattgggtgaagaatggctggacaaccggttattccgcttgggaacaagccgcctggcaaatctcctactctctgatatcaagggagaagaaataaaattcttctaggaaaggctacataagcaatcaaatatgccttaccgcacggctctccgcaaaacgagaaccgatgcggtattttttatttaagaaaaactaaagatagttatcaagcaatccgcaaaaatcattatctttgtctcagatttggctgtggatatctagctaaataattgaaccagagaacgtttcatttattaccaaattcctggaattcggcaaaattcaaagttatgaatggtaataagcaaacgggtctcacgcaccttcatgtatatactgttgttatatagcgaacggagcgtgggactgttgcttgtgtataattcataacggcttgccgaagcctcaggaaaatatatagcaacagtccccacgctttttcagtgaactttaatcataagagtataaaaatggaagcacacattcaagccttaagaataaaccgcaatccgctaaatctagtcctcgggacgaaaagaaagctagggttgcgcattggctatatggaagctgcgttaaaaggtttttatctcaactcaatagaaacaggagttcacccgcaaaagttaacccgactgctgtctgaagaatttcactgcgttgacaccgaatcgaccaacggactattacaattcctgactaatgaaggagacagggttccctatcagatcatgctcccctacctgctctcgtcagacaatatcaacgaatttgaaacaatcatacataaacgctttttcggagtggaacgtttcgtccggcagggaaacaatttatacagattcgtaaaatatacagaggaaagaagagacccgattatatggataaatgacttggaaagaggaattgacgcatgggatatggggatattggtcaacctggcacgtgcggcttatgaaatcggatatatcaccaaaggacaagcatgggaacatattgagcaggcaggaatactatgctccaaaatactccgttcgccggaagaaatagacaagagtttcctcctcgggcgagcaatgcaatcagagaaaatagaagattgggaccgtttattatcgtgctatttacttttgaacagacatcgataaccgctatttttcgcggtctacaacgtaatccagataagaccggagagccacgcagatagcagaatccggcaaagaggccaacagcccaaaggctttttgcttatatgcgttcatcgtccggacagcatattcaataccaccgttttccttggtaaatgcgatcagacgagctatttcagcgagagtagccgtaccctctttcactttgagagcaatttcagcagcctgattgtcattcgctctattaagtgcatacaagacagggagtgtcagtttgccttcaagcatatcgttccctgtcggcttaccgatttccttgctgtcgaaatagtcgaaaatatcatccttaatctgaaaacagataccgatatattcacccaacaagcgggctagtttcacttcttcctcactcactcctaccgagtaagccgccgcctccgtacaggcagcgaatagggccgcagttttcttacgaatcacatcgaaataaactgtctccgaaaagctatgattacttacatttgagagttggagcaactcgccgtcggcaagatcctgccccaatgaagataccagccggataatctgatgactgttcgtcagctcggcatgcaccaggcttgttgccagaagataatcccccgtcagtacggctaccttattattaaagatagtattcaccgagagttgcccacggcgttcggtactttcgtccactacgtcgtcatgcaccaaactggcattatgaagaagttccagagataccgccgcatgaagagtggcaggagacacgacgccataaaggcgtgctaccaacaagacgagaataggacgcatcatctttccactgcgctggcgtatatgagctactacgctatcaagcagtgtattcgaactggaaagagaactatcataaagttctttgaaagcctcaagttcgctttcaatcggtgttctgataatagagatgctgtccattcatgcacaatttgagcacaaaagtaataataaaacgcttaatacggtatttttttgtacttttaccatgaaaaattaataaaatctatggagtcagacaataaattatttcttttagacgcttatgcactgatataccgggcttattatgcctttattaagaatccccgaatcaactcaaaaggattcaacacttcagctattctagggtttgtcaataccctcgaagaagttttgaagaaggagaatcccactcatataggagtggctttcgacccggccggccctaccttccgccacgaggctttcgaacaatataaagcacagcgtgaagaaactccggaagcaatccgtctttccgtacctattataaaagaaatcatccgtgcctaccgtatccctattctggaagtggcaggctacgaggctgacgacgtgataggaacactcgctaccgaagccggacgccaagggattattacttatatgatgaccccggacaaagattacggacaattagtaagcgacaaggtattcatgtaccgccccaaacatacgggaggttttgaagtaatgggtgtcgatgaggtgaaagccaaattcgatattcagtcaccggcacaagtcatcgatatgctcggcctaatgggagattcttcggacaatatccccggctgccccggagtaggagaaaagacagctcaaaaactgatagccgaattcggaagcattgagaatcttctggaacataccgaccaactcaagggagcactgaaaacaaaagtggaaacgaaccgggaaatgattactttctcaaaattcctcgcgactatcaaaatcgacgtgcctatccaactcgatatggattcgctcgttcgtgagcaggcagacgaagattcgctccgacagattttcgaggaactggaattccggacactgatcgatcgcgttctgaaaaaagagaatgccggaaacggaataacaactccaaccggaaacaaaacggcagcagaaaaaagtaacctcgcccctctcccactttttcccgaggaaggcggagccgtgcaaggcgatttatttgcgaattttacgggcaacgagccgggcgaagctaaaaattcaaatctagcgacgttagaaacgctcaattgcgactaccaacttattgatacagaagagaaaagagaagaaattattcaaaagttacttacatcaaaaattctttcgctagatacggaaactaccggaaccgaaccaatggacgccgaattggtcggaatgagtttttccattgccgaaaatgaagctttttatgtcccggtccccgccgatcaggaagaagcgttaaaaatcgtcaatgagttccgcccggtatttgaaaatgaaaactcattgaaggtcggacagaatatcaagtatgatatgatcgttctccaaaattatggagtgcaagtaaaaggcccgttgttcgatacaatgatcgcccattatgttcttcagcctgaactccgtcacggaatggattatcttgccgaaatctatctacgttatcagacaatccatattgatgaactgattggtccgaaagggaagaaccagaaaaatatgcgcgacctcgccccgaaagacgtttatcgttacgcctgcgaagatgcggacgtaaccctgaaactgaaaaacgttctggaaaaggaattaaaggagaatgacgccgagcggctgttctatgatatagaaatgccgcttgttccggtactggttaatatcgaacgcaacggtgtgctgctggatacggaagcgctgaaacaatcttccgctcactttacggcacaaatggagaatatcgaaaaggaaatttacgaactggcaggtgaaacgttcaatattgcttcaccgaagcaagtcggtgaggtgctgtttgataaattaagaattgtagagaaggcaaaaaagactaaaaccgggcaatacgtcacttcggaagaggtgctcgaaagccttcgccacaaacatcctgtggtagaaaagatattagaacaccggggactgaaaaagttattgggaacatacatcgatgcactcccccaactcatcaatccgcgtacaggacgggtacatacttctttcaaccaaaccgttaccgccacgggacgtcttagttcaagcaatccgaacctacaaaatatcccgatccgcgacgagaacggaaaagaaatccgcaaagcattcatccccgatgaaggctgccttttcttctctgcggactactcacagattgaattgcgcatcatggcgcatctgagcgaggataagaacatgatcgacgctttcctcagcaaccatgacatccacgctgccaccgccgcaaagatttataaaattgacttgcaagatgtaggctccgatatgcgtcgcaaagccaaaactgccaatttcggcattatctatggtatatccgtattcggcctcgccgaacggatgaacgtagagcggaaagaagccaaagaacttatcgacggctatttcgaaacctatccgggagtgaaggcttatatggataaaagtatccgggttgcacaagaaaaaggctatgtggagactattttccaccggaaacgcttcttgccggacatcaactcacgaaacgccattgtacgcggatatgcggaacggaatgccattaacgcacctatccagggaagtgcggcagatattatcaaggtggctatggcacgtatctatcaacgtttccaaacggaaggaatacaagccaaaatgatcctgcaagtacatgacgaattgaacttcagtgttcccgttgaagaaaaagaacgtgtagaagaaattgttatcgaagaaatggaacacgcataccgtatgcatgtacctctgaaagctgattgcgggtggggcaagaactggctcgaagctcactaacattatttaactcgctatccgaaagctagaaaaaagatttctttttaaacgaagtgattcgttctatatccggcagattgactgccggatatttttttgtcactaatcttggcaaaaagcaaactactgccagcacccacacttgacaatttgataatatttcactcccaaaaatgcataaatatcaaattaatatgtaagtttgcagcgtaaaactgatacatcagtagacaaatgaaagtataacttaaaactaaaatagccatgaaagcaaaagtatccttaaaaatgttcgttttatccgctgctcttcttattgcatctttcaccgcttccgcacgtaacaacgacggtcagttgatttacaatccgatagaagaaaatggcatgacagtaggccagaccgtttacaaaatggacggaaatacacttgccaactatatgaagtacaattataagtacgacgacaataaacgcatgaccgaaagcgaagccctcaaatgggacagcaacaaggacgaatgggtaaagaatttgcgtatcaactatatttatgaaggcaagaccgtcactaccaattactataaatggaacgctaaaaagcgtgcttatgtactggtacccgagatgactgtaacaatggataatacaaatatgtaacaaaaactctctctcattctaatattctaacaaaagagaacgccgctcctgatgaagaagaggcgttttcactttatataaccgtagactgtatcacaagacataaaaccgttcctgcaattctttcagatagcttctggaaatgaccagatcacctttatcgtggaaaggcggataaagttggcaacactttccatcgatcatagccagataatttacattcacaatggccgattgactgatttgtacgaaagcctgcgaataactgacgatatcctccgctttcgtgttccgtttcaggttcaaccgggtttgattaaacagaaccacctgccattgacgtttatctttcaaatattcaaaaaatccgatttcttccagccgtaagagcttgaatcctgtcaccgtgctaatcataaacattccctgttgcggcatcagagctataatagaagaagcaaaagagggaggcaccactacagcagaacgcaccgctttccgataacggtctatgacaactttcaagtcttccgcgctaaaaggtttcaacaagaaatcaaaagccgactcacgcaaagcctgaagcagatatttatcataggacgtatagaacacaaccttcatatcccacaatacatcatcctttatctcacttagcaaattaaggcccaatatatccggaagctccacatcaagaaagagtaaatccggatgcaactccataatcatctttttcccttttgcaccactgcttgcaattccctttatctcaaattcacgataaggctccagttcacggcgcaaagcgtcacttgcagaacgttcgtcatcaatgatgaccactttgtacttttcttctgtatccatcataaatcataagaaaaacgaaacgggatatataccgaaactaatgtaccggtctgtccactgtttctattggttatttcaaaacgtattttgtcactcttgtttttcgtattcagcagttgaatggtctgatacaacaccttcagtccggtacccgttccccgtgttgccgaagttacgtgcggaagatacccgcggccgttatcacaaatcgtaatacagataccattcttttcatgagagacatgtatcgtcaactccttttcaccatctttcccaaccagtccatgcttgattgcattctcaaccgggatttgtataatcatcgaaggaatcatcacacgacttgcatccagtccttcttccactgtaaccgttgccgtaaaatcttcgccgacgcgtcctctttcgagattaatatacgaacgtacaaaatccagctcgtcttgtaaggaaacacttagtttttccgtcagttcaagactgcgtcggagatatttaaccagctccaacaggttattcttcacatcttccgaccccgtgaactgattaatctcacgtcccaatacattgaaagtgaaatggggggaaatccggctccgcaggttctccatgcggacacggttgatttgccggaaaaagcgttcacgaagaaattctcttttcttccgcatataccagatgataccgcctgttcctgcaactagcagcacacaaacaagtacccatatataaacgctcaacttcaaagctttcacttcacctgcctgccgttgaatctgcatttctttccgcaatacaatagtgtcctgacgatagcgcatatccagttctgcgacacgtgtctgtacccgttcgctacggatagaatcatccagacgacagtcacgcttcaaatattcataagcacggcggtagtcaccggcacgctcgaagtaatgctggagatattggttgcgtattgtcagcatattggcatcaagatgtcccacaggagcggtacgttctatcattttatgagccagcgccatatttcctttctgtaacgccagttcaatcatttgagtttcgatatagtatacagccgagttatgctgaatttccgaaaagaaacgataactctcgtccaggcatatctgtgctgaatccaagttattggtcaacaagtataattctcccaggtttactttgataaagttctgttcaaacaccatttgggggtgggcggagactaaggcattggctctgcgcatatagttcaatgcttcctgataattcttcctgtaataataatgatttccgcgattgttgagataggtccaacgttctcccacattcatttcgtcaaagaattttcctgccagctcataataatggttggacaaatcgaagtcgcgcaagtccatataagtttgtcccaaaccgtaatagacagggaatttcgtatgttcggacaatctcagagaatcgcagagaaacaaggcgcggcggtaataagaggcagtgtgcgccaagtcactgcgatgcaggcaggcgtcagccatattgatacaaatgtcgggaagaaggtgcaggcgctttcctttcagacgatatgcatacgccttttgataatcaagtatggcagaatcgggacggttcaactgcatccaaacgtttccttcaacattataaacatcggccaggacatcgttccagcgaggacactcggaaacattgcgggagaattgcttaacctgtcgattgtaataaagtatggagtcaaaatcagaagaaacaaagaaggttttaccataaagggcgagcagacgataatacacttgtgagtcttgcacttgcaccagcgcgtcacgtacctgcgaacgggaataaagtacattggagaaaagagaatcctgaacgcggacttcgagagaatcgacaagttcctgctcacaaaaaggcttatggcgatgcctgtcagcacacccgcaatacaacaatatcaaaagcccgaacaagccaaacagcttcatagtagtcctcccattcatcaaccccttattcatgtcatgttttgaaagtgacaaaaatacattatttatcctgaatcccaaccaattttattatttttttaatacctttgtccccatataaatatgagcaactgacctaatgagtccactgaacttcacccacattttgacacaggcagtcgatgagctatcggaaagcgaatcttacaaaggactgtttcatcaacacaaagatggcgaaccactgccctctgctaaagtcttgtatgaaattatcgagctttcacgctctatcttatttcccggatattacggaaattccactatcaacagccggacaatcaattaccacatcggtgtaaatattgagaagttatttgatttgcttaccgagcaaatccttgccggattgtgttttggaaccagtatagaaggaagatgtaatgcctgctccgattccaagagagaagaagcagcccgccttgccgccaagtttatcagcaaattgcctgtcatgcgcagagtgctggctaccgacgtagaagccgcctataacggcgaccctgccgccgaaagttatggcgaagttattttctgctatcccgctatcaaggccatcagtaactaccgcatcgcgcatgagctactggaactgggtgtccccctgattccgcgtatcattacggaaatggcgcacagcgaaacaggtattgatattcatccggccgccaagattggcagtcacttcacgatcgaccacggcacaggtgtggtaatcggcgcaacgagtatcatcggaaacaacgtcaaactctatcagggcgtcactctgggagccaagagtttcccgctggatgcggatggaaagccgatcaaaggcatcccgcgccacccgatactggaagacaatgtaatcgtttattccaacgccactatcctgggaagaatcactatcggacgcgatgcaaccgtaggcggtaatatctgggtgacggagaacgtccccgcaggagcaagaatcgtacaaaccaaagcaaaaaaataaaaccaaataactatatatgagcgaacaattcgagatgattgccaagaccttccagggactggaggagatacttgcagaagagctgacagcactaggagccaacgacattcaaataggccgccgaatggtgtcattcacaggggataagcgtatgatgtataaggctaatttctgcctccgtactgctatccgtattcttaaaccgatcaagaactttacggcaaaggatgccgacgaagtttacaatgaaatacaggcaattccttgggaggaatatctcgacgtaaacaagacatttgcaatagatgcagtagtattcagcgaagaattccgccattcgaagtttgtttcgtacaaggtgaaagatgcaatcgtggattatttccgtgaaaagacaagcaaacgcccgtctgtacgcatcagcaatccggacgtattgttgaatatccatatcgcacaaacgacctgcaccttgtctttggactcgtccggtgaatcacttcaccggcgcggttaccgccaggaagccgtagaagctccgttgaacgaggtattggctgccggtatgattctgatgaccggctggcggggagaatgtgacttgattgatccgatgtgcggttcgggtactattccagtggaagctgcattgatagcaagaaacatcgctccgggcgtattccgtaagggatttgcatttgagaaatgggtggatttcgatgcggatatgttcgacgagctttacaatgacgacagtcaggagcgtgaatttacacataaaatttacggatacgacaacaatccgaaagcgaacgaaatagcaactcataacataaaggcagcgggggtatcgaaagatgtcgtactgaaactgcaaccgttccagcaattcgaacagccgaaagagaagtctgtcatcatcaccaaccctccttatggagagcgtatttccaccaatgatttgctcggactataccaaatgattggcgagcgcctgaaacacgcgtttgtaggaaacgaggcatgggttctctcctaccgggaagagtgtttcgaccagattggtttgaaagccagccaaaaggttcctttgttcaacgggccactggaatgtgaattccgcaaatatgaaatctttgacggaaaatacaaggagttcaagagtcaggaagaagcaggagaagaaaagaaagagacggaaggagaacaagcgtctaagttcagggaaagaaaagaatataaacctcgtcgggaaggagaattcaaaccccgtagagaaagtgagttcaggccgcgccgggaaggtgactccagacctcgcagagaaggagaatacaagccgcaccgggaagaaggagaattcaagcgggaaggaaacagagagagaaaaccgcagggagaattccgtagccgaagagacccgaaaactccgagagagttcaaaggaaatcgggaaccgaggattccgaagaaggaagaggagtaaacaagcgttaatagttaattgcacattcacaagaaattagcaacgaaaagcaatttaatggattattcaatgcttttgccaagttgggtgctgctattcggataaagagtacttctttggacagagtaaaaataaaaggatttaaaaacaaataataaagaaaagagcaatgaataaagttggaaaaagagccttccttttgttgttggcaatcccaattgtaatcaatgttatggcacaagaaaccaagaaaccgacactggaagacctgattccgggcggtgaaagttatcgttatgcagaaaacctgtacgggctgcaatggtggggcgacgagtgtattaaacccggtatcgacaccatctattctatccagccgcaaacaggcaaagaaacaatgctcatcacccgtgagcaaatcaacaaagcgcttgcagaagacaaggcaggaaagttatcccatttgtattccgtacgtttcccatgggcggaaaagccgcaaatgttactgaacatagccggaaaatacatcgtatatgatttcaagaacaaccggattgtcagcagtcgcaagcctaaagccaaagcggaaaacgaagactactgcaccgccaatggaaatgtagcctatacaatcggcaacaatctatacgtaaacgaacaggcggtgacgaacgagcccgaaggcatcgtctgcggccagtccgtacaccgcaatgagttcggtatcaacaaaggtacattctggagcccgaaaggtaatctgctcgccttctaccgtatggatgaaagtatggtgactcaatacccgcttgtagacattaccgcacgtgtgggcgaagtgaacaatgtccgctatccaatggcaggaatgaccagccaccaagtgaaggtaggtatctacaaccccgcaacgggcaaaagcatttacctggatgcaggcgaccctaccgaccgctactttacgaacatcagttgggcaccggacgagaagagcctctacctgattgaagtaaaccgcgaccagaaccatgccaaactttgccaatacaacgcagaaacaggcaagctgacaaaggtgctctacgaagaaactcacccgaaatacgtagagccgcaaaacccgattatattcttgccgtgggataccagcaaattcatttatcagagccagcgcgatggatacaatcacctctatctgtttgataccaaagcaagcatttacggtgaccttcaggaaggaaccggcggcgcccaatatcgcgaatcagtgaaggtaaaacagttgactaaaggcaactggctggtaaaaaacatattaggcttcaacgctaagcggaaagaagttatcttcaccgccatagagggcttgagaagcggtcatttcgcagtaaacgtgaacaacggaaagatgagccgcccgttcgatagcagtaaagagagtgaacacaacggagtgctcaacgcttccgggacgttccttatcgaccgttattccactaaagaccagccccgcataattaatctggtagatacaaagaacttcaaagaaaccgtaaacctgctgactgccaaagacccgtatgaaggttatcaaatgccaagtattgaaaccgggacaatcaaagcggccgacggcacaaccgaccttcactaccgcctgatgaagccggcaaactttgactcgaacaagaaatatccaaccattatttacgtctacggaggtcctcatgcccaatgtgtcaccggaggctggcagaatggcgcacgtggctgggacacgtatatggccaacaaaggctatatcatgtttacgatcgacaatcgtggcagcagtaaccgcggactggagtttgagaacgccaccttccgtcgcctcggcattgaagaaggcaaagaccaggtaaaaggtgtcgaattcctgaaatccctcccttacgtagacggcggacgcatcggcgtgcacggctggagctttggagggcacatgaccactgccttgttgctccgttacccggaaatattcaaagtaggcgtagccggtggccctgtcatcgactggggatattatgaagtgatgtacggcgaacgctatatggacacaccggaaaccaatcctgaaggttacaaggaatgcaacctgaaaaacctcgcgggtcagttgaaaggtcatctgctgattatccatgacgaccatgacgacacttgcgtgcctcaacacaccttgtcgttcatgaaagcttgtgtagacgcccgcacctaccccgacctgttcatctacccgtgccacaagcacaacgtgtcaggtcgcgaccgtgtacatctgcacgaaaaaatcacccggtactttgagcagaacctgtaaaagcggctgcttatccatacctaatcaaacgtataacagtataacttataacagtataaagatgaagattttattactaggctcgggcggccgcgaacatgcactggcatggaaaattgcccaaagtccgaaagttgagaagctgtatattgctccgggaaatgccggaacaactgccgtaggcgaaaatgtcaacatcaaggctactgattttgaagctatcagcgctttcgccctgaaggaagacatcgccatggtcgtagtaggtcccgaagatccgttggtaaaaggaatctacgactacttccagaaccgccccgaacttaaacacatcgctgttatcggtccctccgcacagggagccgaactggaaggaagcaaggaatttgcaaaaggcttcatgatgcgtcacaacatcccgacagcccgttacaaaagtatcacttccgcaactattgaagaaggtttggccttcctcgaaacattggaagctccttatgtactgaaagccgacggcctctgtgccggaaaaggcgtactgattctccccacgctggacgaagccaaaaaggaactgaaagaaatgctcggcggtatgttcggctctgcatcggcaacagttgtcattgaagagttcctgagcggtatcgagtgttccgtatttgtcctgaccgacggtgaaaactataaagtcctccccgtagcaaaagactacaaacgtatcggtgaaggcgacaaaggtctgaatacagggggcatgggtagcgtaacccctgttccgtttgccgacgaagtgttcatggagaaagtacgcacccgcatcatcgagccgacaatcaacggcctgaaagaagagaatatcgtctacaaaggtttcatcttcctcggattaatcaatgtgaaaggtgagccaatggtgatcgaatacaacgtccgtatgggcgacccggaaacagaaagcgtcatgctccgcattcagagcgatctcgtggaactgctggaaggcactgccgcaggcaacctgaacgaaaagacactcgttatggacccgcgttcggcaggttgtgtgattctcgtcagcggcggttacccggaagcttatgagaaaggattcccgatcagcggactggaacaggctgccgctacggaaagtatcattttccatgccggaacagctatgaaagacggccaagtagttacaaacggaggacgcgttatcgctgtctgctcctatggagctactaaagaagaagcgttggcacagagctacaaagtagcggacatgattgacttcgacaagaagtacttccgccgcgacatcggcttcgacctataactgccggcgtaacgccgaagcaaggcttccattcgacagcattgtttcaaatgagaggcgatgtttattctagagaagagacgatgtcaacgctaaataagaatcaccttggtaaagccacgctagaggcaaatctatctccattctcctccttcgggaaggaggagtacccgtagggggaggtggtaggtgaatacataagtctattattaaaacagataggcgcacctaccaccccggttttcagccacccctccttcccggaaggaggggaagccattcggagaaaaccattcggaaagaaaggaaagaaagggagagaagggaaagaaaccatagaaaccacagaagaaacagaagcaacaaaaaaataattgaacgagattaaatgagaaataaaaagctgcaaggtcaagtaacagcagggcggtggacgctgcctatcgttgtctttatctgtaccctctgttgggtactgacatcctttttactgcccgacctcacagcctcaacagtggaagacagcactctctccctctggcaatccgcccgcgacttgttacttcccgcatgggccgaacgacttgtcagctatctgatttatgccgttatcggttatagcctgatagagctgaacaaccgtttcggcattatccgtatgcgggcgtccatgcagacagccatatactttctgttggtcactatctgcccggaaatgcacttgctatatgcaggagacattgcagcccttgctttcctgttctccatttatttcctgttcaaaagttatcagcagccgcaggcagcaggctatttattctattccttccttttcatcggagcgggaagcctgcttttcccccaactcaccttcctttcggtactctggatattcgaagctcaccgttttcaggcactcaagccccgtagtttctgcggtgcgctcttaggctgggtagtgccttactggttcctgttcgggcacgccttcttctacaatcaaatggagttattctaccgtccgtttaccgaactggtaactttcggcaagcccttcgacctgcaaattctccaaccttgggaattggcggttctcggctatttacttgtactgttcattgtcagcgccgcccattgcatcatcgcaggatttgaagacaagatacgcacccgtgcctatctgcaatttcttatcgacctgaatatcttcctcttcctgctcatagctttgcagccaacctattgtgtcaatctgttgccgttgctcatgataagcagcagcatcctgatcggacattttttcgtactgaccaacagcaagacatcgaacgtattcttcataatctcgctggtcagtctcatcctcctattcagttttaatatatggacgcttttatagactcaacaatacaactcctcatcgaatggggattaccgggattattcatctcggctttactggccggcagcatcgtgcctttcagttccgaactggtactggtggcactcgtcaaactcgacctgccccctaccgcctgcctgatatccgccgcactcggcaacacggtaggcggaatgacctgttactatatgggacgtctgggcaaaataagctggatagagaaatatttcaaggtaaagaaagaaaaggtagacaaaatggtgaacttcctgcaagggaaaggagcacttatggcatttttcgccttccttccggctatcggtgaagttatctccattgcactgggatttatgcgaagcaatatatggcttacggtagcttccatgtttgccggcaagttgatacgttacatccttctcctgtatgtgctggaaagtgcatggaatgtggtagcaggataaatgtttcattaagtaatcaagcaataagtatcagatagcaagttatacgatgaaaagaataatcgagaagaccgatgacgggagcactaccctgtttgttccggaattgaatgagcattatcattcaacgaaaggggcacgcacggagtcccagcacattttcatcaatatgggactgaaagcctccaccgccaccacccctcacattctggaaataggtttcggaacaggtctgaacgcctggctcaccctcgaagaagcagaaaaaagcgggaggaatgtatactatacaggtctggaactctatcccctggaatggcaactcgtagagcaactggggtatatttccgccaacgaacaactaatgacaggcgacaaccagtgtccggcccacgagttattcaaacagcttcatacctccccgtgggaagaagacgtaccgattacccctcacttcaccctacgaaaagtacaaaaagactttaataagctggaaacagagacagaagggtggaaagcagacgtgatttacttcgacgccttcgcaccggaaaagcagccggagatgtggtcgcaagaactattcaaccgcctttatgttttattaaataacggcggaatcctgacgacttattgtgccaaaggagtcgtcaggcgaatgttgcaggccgcaggattcatcgtggaacgtcttcccggccctccgggaggaaaacgggaaatactgcgggcccggaaacaagaataagaacttaaaaacgaaaacaagaataagtaaaacaagataagtaagaacaacccgaaaatacaacaagtcatgaaaaagcaactaatagatatgaagaccctgcttatcatcggctcctgcctcctactggcagcgtgcaccggacgaacgtcccaaagcggtactgaggaaaagccggtcattaccgtcacactcgaaccgcaacgctatttcacggaagccattgcaggcgacaagttcacggtagtcagcatggtccccaaaggttccagcccggaaacatacgacccggttccgcagcaactcgtatcccttggcgacagcaaagcctacttccgcatcggttacatcggcttcgaacaggcctggatggaccgtctgatgaacaatgcccctcatatccaagtgttcgacacctccaaaggaatagacctgattctgaacgacaacgaacatggcaacggatatcatgaccatgaaggtcacaatcatccaggtcacagtcatgccgtagagccacatatatggaactcgaccgccaacgccctcatccttgccggaaatacgtataaagcgctctgcacccttgataaagccaatgagctttattacaggaaccgatacgactccctctaccaacgcatccagcaaacggacagtctgattcgtcaacaactctccgcaccggacgccgccaaatcctttatgatttaccacccggccctctcctactttgcccgtgactacggactgcaccagatttctatcgaagaaggaggcaaagaaccctctcccgcccacctgaaagagctgatagacctctgcaaagcggaagacgtgcgtgtaatcttcgtccaaccggagtttgacaagcgcaatgcggaaactatcgcgcagcagaccggtaccaaagtagttcctatcaaccccctcagctacgactgggaaacagaaatgctgaatgtagccaaagctctcgccccggccgagacaaaggaacaaacagtcagacagtgatatcagaaaagccaatgacgaagccaattatcgaaataaaaaacctatccgccggatacgacggccgcaatgttctccatgacatcaaccttgccgtctacgaacgggacttcctcggaattatcggtccgaacggaggcgggaagacaacgcttataaagtgcatcctcggtctgctaaagcccaccggaggggaaattagtttcaactgtaagccttctttgggctacctgcctcaatacagcacgatcgaccggaaatttcccatatcagtggaggaagtaatcctttccggactcagcatacagaagtcactgacctcccgtttcacccccgaacaaaaggagaagggcaagcaaattattgcccgcatggggctcgaaggactcgaacaccgtgctatcgggcaattaagcggcggacagttgcaacgcgcgcttctgggacgcgccataatctccgacccttccgtgcttattttggacgaacccagcacgtatatcgacaagcgtttcgaagcacgcctctacgagttgctggcggaaattaataaagaatgtgccattatccttgtcagtcacgacatcggcacggtgctgcaacaggtgaaatctatcgcctgtgtcaacgaaactctggattatcatcccgatacggggggcaccaccgaatggttggaaaagaactttaactgtcctatcgaactgctcggacacgggacgcttccgcaccgcattctgggtgaacatcatcatcaccactagccgttcgctgtggaggggtggacaggtagatacataatgctgataatctattaatttacgcatgcacctaccacctccccctacgggtactcctccttccagaaggaggagaatatagatagtatcggctttaaagttcctttataaggacggtatcaatggattagagcggcggtattgttagcttgccacggccgtggtaggtattcgtcacgggcgtggagagatccttccacagccatggcaggaagtctccacggctgtggcaatccaatgatagcggtagtgtaatgtaactttccttacttgttttctcatgtttgccggctcttctacttatataatgcggcttcacagcagagttttcattacggttcttcctcacccctatcagggcttttcccaaccgccgcagagacataagatagcgtaaatcatcttcccgttacttaatatttcttactttctacctcattatccttacaaatcactatctttgcgaccgcataacctgtttttaacgaataaactacgatagtgctaatgaaacagtacagaaccgtaaacaacctcatgggttggcttacattcatcattgcggcaacggtttattgcctgacaatagaaccgactgcaagtttctgggattgccccgagtttataactaccggctacaaactggaagtcggtcacccgcccggcgcacctttcttcatgctaatggcgaacctgttcacccagtttgcctccgatgtgaccaccgtggcaaaaatggtgaattatatgagtgccctgatgagcggtgcctgtatcctgttccttttctggagcatcacccacctggttcgcaaactgattatcaccgatgaaaacaatattaccaaaggccagcttgtcaccattatgggtagcggactggtcggtgcactggtttatacattcagtgacacattctggttctcggccgtagaaggcgaagtatacgctttctcctccctgttcaccgccgttgttttctggctgatactgaagtgggaagacgtagccgaccagcctcacagcgaccgttggattatcctcatcgcctacctgaccggtttgagtatcggcgtacacttgctcaacttgctttgtttgcccgctatcgtgctggtttactattataagaaaactccgaatgccaccgcaaaaggttcattgcttgcccttttcggttccatggtgctcgtggcagccgtgctctacggcattgtgccgggtatcgtgaaagtaggcggctggttcgaactgttgtttgtcaacggattgggaatgccgttcaacaccggggtagtggtctatatcatcctgcttgcagcagcgctgatctggggtgtttacgaaagttacacgcaaaagagcaaggcgcgcatggctgtttcctttatcctgacgattgctctgctcggtatcccgttctacggacatggagccagcagtatcctcatcggtatcctcgtaatcggcgtattggctatctatcttgccccgcagatgcaggaaaagatgaaagagaaatggcgtatttcggcgcgcacgctgaacacgacattgctgtgcacgatgatgatcgttatcggctattcgtcttatgcactgatcgttatccgctctaccgccaacacgcccatggaccagaactcaccggaagatatcttcacgctgggcgaatacctcggtcgtgagcagtatggcacacgcccgttgttctacggccctgctttctcctccaaagtggcactcgacgtaaaagacggttattgcattccccgccagtcagaaacaggcagcaagtatgtccgcaaggaaaagacttcgccggacgaaaaagactcttatatcgaactccccggacgtatcgagtatgaatacgcacagaatatgcttttcccgcgtatgtacagttcctcgcacgccccgctctacaagcaatgggttgacatcaagggacatgacgtaccttacgaccaatgcggagaaatggtcatggtgaatatgcctacccaatgggagaacatcaagttcttcttctcctaccagttgaacttcatgtactggcgttacttcatgtggaacttcgccggacgccagaacgacattcagggtagcggagaaatagaacacggcaactggattaccggtattccgttcatcgataacctgctcgtaggcaatcaggaattcctgccgcaggacctcaagaataacaaaggacacaatgtattctactgcctgccgttgctgctcggactgatcgggcttttctggcaagcctaccacagtcagcgtggtatccagcagttctgggtagtattcttcctgttcttcatgacgggtatcgccattgtgctctacctcaaccagacgcctgcacagcctcgtgaacgagattatgcatacgccggttcattctatgcctttgccatctgggtaggtatgggtgtggcaggtgttatccggctattgcgggagtactgcaagatgcaggaacttcctgccgctgctctggcttccgttctctgcctgtttgtccccattcaaatggcaggacagacgtgggacgaccacgaccgtagcggccgcttcgtagcccgcgacttcggccagaactatctgatgaccctgcaggaatcaggaaacccgattatctacaccaacggtgataacgatactttccctctgtggtacaatcaggaaacggaaggcttccgtaccgatgcccgcacttgtaacctgagttacttgcagaccgactggtacatcgaccagatgaagcgtccggcatacgattcgccctctctccctatcacatgggaccgcgtccaatacgtggaaggacagaacgagtatatctctatccgcccggaaatgaagaagctcatcgacaactacttcaagcaggccgaagaactggcagcacagggagacaccaccgtattgtctctcgtccactctatcttcggagagaacccgtatgaactgaaggagattatcaaccgctggatgctcggcaagaacgaccaactgaaggaactgctcaagaaaagcggacagggaatcgaacttcctctgatcccgacggacagtatcgtgatgaaagtggatgcggaagccgtgcgccgttccggcatgaagataccggaagccttgggtgactctatccccgaatatatgactatctcgctgaaagacgccaacggcaacccgaaacgcgcgctttacaagagcgaactgatgatgctcgaaatgctggccaacgccaactgggaacgcccgatctatatggcaatcaccgtaggcagcgaaaaccacctcggcatggataaccacttcgttcaggaaggtcttgcctaccgcttcactccgttcgaaacggacaaactgaacagcaaaatcgacagtgaaaagatgtacgacaacctgatgaacaagttcaagttcggcggtatcgacaagccgggaatctacatcgacgagaacgtgatgcgtatgtgctacacacaccgccgcatcttcacgcaactggtgggacaactcatcaaggaaggcaaaaaagacaaggcgcttgccgccctcgactatgccgagaagatgattccatcgtccaacgtaccgtacgactgggccaacggggctttccaaatggcagaagcctactatcagttgggacagacagagaaagcgaacaagattatcgacgaacttgccaacaagtcgctcgaatacatggtctggtacctgagtctgaccgactaccaactctccattgccagcgaaaacttcatgtacaatgcaggattgcttgacgcggaagtacgcctaatggagaaatacaaatcagaagaacttgcaaaacactactccgaacagctcgaccaactatacaacgagtatgtgacgagaatgaaagggaaataaattaagcaataagtaacaagtattaagcgatatcatccatgcggtttacaacgcagcccattgcttattacttgttacttattatcctcaaatccgcaactacgcgcctaatatgatacagaagcgaaaagaatctgcatcgttagtaaaaagggggcacagtgcatcgaatgtcaccataaagacatataaatgccccttaccccaccatgcgacttgaggcaatacgcaaaatcacgactataagttgtcggtgttatccaaagtcattctggaacacattggcataagcattgttgcatgaatagatattcagcacatacttccttgatgtcctgacccatttggctggcacagagatgaacttaaagacaaacgtcttgatgcggcttgttgctttgagtccgaacctcttcacgtcaagcctcgccatgatgaatttatagaagttgcgtatgagtgccataagcagaagaaacaccgtgttttctcccataaaggattttggaagcctgttccagccgaatccgttattcatatcatcgaagatgcgttccttccctccacggaggttatagaattcgacaatctctttctcggaagactcgtagtcatttgtaaggatgcagcggtaggtgtattctccttcccacaggtcgagttcgccgtctatccgcttctgtctttgaatcacaagacggtatgccttccctttccatttctcgatgagaatggaggccagctcaaactcaatgccgcccaattccactttcttccaacctctgagggcaaagatgtcattgtagagcgaactgcatcggttagcacggatatagaaggtcttgcagtgtttagcaatctcttccactatctcttcagaacacgagccgcaatcagctctgaaacggttgataataagcttgttttgttcaaacctttcaaagaacctcttcagcgtgtccttctggtggaaacggacatttgtgttgccgtcgctgttctcaatgccgacaatcaagttgccaataaccgccacgccagggcgataaccaaggaacttcttgtatgtaggcttcgcatcaaacttctcagcctctatgaactggtggtcgaagtcaacgtcatacccctcgccctctttcagctgccctgtggacaataggcaattgaggagcagtgtattcagcttgtctgccgtgttgaagtcgtaggtcttgccagtgtcggatgtgtaggaaatgttatcctgggtcagttcctttatggctctaagaatcgtgtcggcactgcatgtgcgaagtgtcggatgaagcgaaaggtggtacatcagatgagtggtgacatcctcgatgcatgagccgccacaaaaataaacgctcataagcgaacggatgatttcgctgtattgataaccatacagcctgcatctcataccgagggttgagtcgattacagatgagagtctggagtcaaattgctccattattgaaaatattcctccaaaaggagtgagtttctcggatttaattgctacctttgccatgtctgtcgggtttgatacatattttgatttgcaacactaagataggtgaaaaatctgacatggcaaattcctgagcaactttttgttgctcaggtacttaaaaagttatatttgtaatagtgttgcggaattaaggattatttcaaaaaagtacaaactctcatgtttatagaacaaccaccgtggtttttccgggcgttgtatccgcaagccattttccgaatggacccgaacgaacgggccgtctacctgacttttgatgacggacctatccccgaagttactccctgggtactggaattgctggaaaaacacaatattaaagctaccttcttcatggtaggcgacaatataaagaaacacccggacgaataccggatggtggtagaacacggtcaccgcatcggcaaccacactttcaaccacatccgtggattcgaatactccaaccccgactatctggcaaatgcccaaaaagtagatgaaatcatacattccgacctgttccgcccgccacacggccacatgggtttccgacaatactataccctccgctatcattaccggatcatcatgtgggacctcgtgacccgcgattacagtaagcggatgcgcccggaacaggtactcaacaacgtgaaacgttacgcacgcaacggctctatcatcaccttccacgactccctgaaatcatggaacaacgggaatctgcaatatgccctcccccgctctatcgagtttctgaaagcggaaggatatgagtttaaagtgttataacgttacgcgagctatacagaatacgttatatcagctataaaaatggaagcactcctccccactgaaataatcaaagccgaagccctgcgcctcggcttttcagcctgtggagcagcgcctgccgaagctgtcagtgaaaaggttgctgatactttccgccaatggcttgcagacggttgccagggggaaatggcttatatgcagaattatgaggacaagcgcctcgacccgcggctcttagtagaaggggcacgcaccgttatcagtgttgccctgaactattatcccgaaacgaagctgccggagaatgaataccagatagcgtggtatgcctacggcaaagattatcacgatgtcatgaaggcaaagctcaagacgttgcttgagtttatccaaaacaactattctgccggcggacgcgccttctgcgacaccgcccccgtactcgaacgctattgggcatggcgtgccggactcggctggatagggaaaaacacccagcttatcattccgcaagcgggttcttgcttctttttgggagaattaattattgacttgcctgccgaccgctatgacagtccgcaggaaaaccgttgcggttcatgtacccattgcctcaacgcttgtcctacaaaagcgctagaagcgcctttcaggctcaattccgccaaatgtctctcttacctgaccattgaataccgtggagaacttccgcccgatacggggcaaaaaatgggcaaaatgatctacggctgcgacgaatgtcaacgtgcctgtccatggaaccgcttcgcgactccttcacggacaatagaattctccccttccgcctccctgctgaccatgcggaaggaagactggcaccgcctctcggaagaacaatacaggacactgttcaagggcagcgcagtgaaaagggtcaagtatcagggactcatgcgaaacatccggtccgcgaaaaagtaagtgaccgaagttctgaaaacacgccgcacggtctgaataagcaaaatttagcaaccatattgttctcccgcctcattatttttcataaatttgcagcggactcttccgcagaaagccttcgggtggttagtggggagagctgtttatatagagaagacgtttacaagcgtttgtctttcgtgtttcaaaacttcgcagtttttttcatatcaccagaaagatgaatagcaacaaagacgtcctcctgatgtgtatttatatacatccgtgcctctctttgccgaaacaaagggaggttacgggtgttgtacatatcggcgtgggctttctgcgttgttcgttcttgatgatatggcattgcgaaggccttgaaacacggaacggacgaaggtgagattcccacgcctcttttatatattctcgccggtattacaataatccgttcctccaacgggaatccgggggacgcacacttgcagaatgacatgattcatgcgggacaacttatcgaacgcacgcttcacgaacaaggacgtactgttacctggttcgccagtcagctatgctgcacacgtcccaacgtctacaagatcttccggaaagagaatatcgacatccacctgctctggcgcatctcctgcatcctcaaccacgacttcttccacgatttatccgacagcatcagtacgggcagctcctccggtgtatccaaataggatacaattccgtatcctccttggaactatgttttctcctgctggtatagtcctttcgcatacctttgcaagcatattaacatataatcacaaagggatatgaaaacgaaaaaactgattttagttattttcctcacctttatcggtgcaatcggagcgtacgcacagaaaacaaatgtaagaatgcaggaaacacaggcacgtctactggatgtcacctcaaacgcttatgtaaagccgctaaccgtggagttgcagatagacaaatcgaaaggacgcatcaaagacgaatggacgctcaccagagaacaagccgaacaggagatgaatggcgacctggtcaacatccgcagctatgcaatctatatgtcttcgcaaaaacataatgcagacgtgatagtggcagccacattcaacgtcaaaaccaatgacgacgggaacgggtataaagtgaccgtcatcggctatccggccacctttatcaactggaagacggcagaagcctcggactacgaatggatccgtatggaaaaaactctcacaacagccgacaaagacaagatagccgccgtcatcaaataacaaccgttatcaaataaacagacaacaagtattaataatcaaatagaatttcaacatgaaaaaactattatcattggcagccgcattcttactgtgtgcaggcgtgcaagcacagattgtatcatccagaagtgtcagcatcaaatccgctcagaaacagccttctgaaacacaatggttcctgcgtggcggattgaatgtcatgaaaatgaccggagacggagcggaagacaccggcagcaaactcggttacaactttgtttacggtttccagaagccattagggagtgtaggtacgtactggggaatggagttcggactcggttcccgcggctggaaggtcgaagaaaacgaaagcgactacgaatacagcctaagcttaatggctcacaacgtacaggtttctccgtttactttcggatataaatacaacattacggatgctctggcagtcgacgcacatctcggcgcttacgtaagttgcgactatgtaggtaagattaaagaaaaagaatcctatcagggagacagtgaagaaacaagcgtcaacatgggcgactgggaagactggaagcgggtggatgcaggcatgaatatcggtgtcggtatatggtacgaccgtttcaacctggatttcacttatcagcgcggctttatcaaaacatgggagtgtaacaccagcaatgtcctgattcgtctgggtgtagctttctaagtgaagtacaatcaaacctcaattacacatatatccagcgttcacgtctttctctctcaacagggagaaggggtgaatgctgtttttcttaaaaacaacggagtatgatgaccaaacaacgattccttgcaattatctatctactgatagggataatactgcccgccatagcgcagacgtttacggaacagaagaaaacttatcctgtcagtgccgacggcagcaaatacgtagtcagcgggtttacttctttcagcccggcaagcgatgagcatatctacgccaacgcgctattgtggacggtggagaacgtctgtccgaagctacgtgaaggaataacggaagccaacgtaccggccaaaagtttcagttgcgacctggtactcgcctcgcaagcagattcaaagcagaacaacacctattattgcaaagccattttccgggtagcggaaggcaagctggtctactatctctctgatgtcctgatagaatcgtcggtacttgtaatgaagaaagtcaccgccatggagaaactgcaaccggagaagaaagcgtcgcacaaggagataatggatgatttcgtacaggtggaatcgcaaatgctcaaccggatgttcgacttcatcgccacacatcaactttcaccgatcacccattggaacgagatcagtatcggtaaaccggtgaaaggtatgaccgaggatgaatgccgcctggctttcggcaaaccgcaaacggttctggaatcaaacggagaagtgcagtggatgtactccagctccttttatgttttcttcaagaacggacgtgtggaaacaattatcaaataagtttagaaacatatagataatctataagaaaaagaagcatcaattgaatattcactacgtacgcctatatacaaaaaagaatagctgctttatcacaagacagctattctacataattaatgtaagctaaatcatctttcaaagaatttatgatccgacttactctaaactcgcttgcttacatatattcaaaacatgttatttattctagtatctttcatgtcgctgtatctttagtattaagtcattctacattccagcatataacttgtttcattggtgttccattacaatatcaaccgcatacccgtaactttttccggcaaactggcctccattttcccatttcttatcaaaaatgccatacataaatccgtctactttatgatctttccatgttccatcatctttaaactcaaagaatggtaatcctgcttttgtaaactgcaaatcagcaacatacgtgatatttcctccccaagttaatacattagccgctttatcatacgcacagagataaatgtaattaggagagataaatcccaaatactgattatcaaagttgataaccagccgtccgtcagtcaatacagctttaaaaggtacaccattattgagcggaacatcttttgctatcaaatcatacactcccttctcatctgttgccgtaaaggtacaactacccgtataacgttttccgtcattacgggtatgcatcatagtatatgtaccggacaatcctcgctgaacacaagtcgccgaccattcatttttcccactctgaacggtcaacgtcccttcccgataatccgtaccgtccaacataggagaaaccaccacatgaagctgatcgcctttcaattcataagtcagccattcggcagtagattgaatactatattcgcgccgggtatgcaaagtgaaaacagcttcacccccttgcataagaaaatcctttgtaccttctacatcacaaataaaagtatcgcccaactgggtcacgggaacttgcaatatatcttccccggattgtatgaccaccattgtggtacgactggatatagaaagattagcctcaacaaccaaactgacttcctgatcggacacactggctaccttacaccaagcgacatccgaggtggcacttacctgtttaccgcctgacagttcaatagttcctgtgccaccattcgcagaaaacttaacatccgaccttatcgcctttaatgctacatccgccgtatccttatcatcactacaaccaatagccgacaagcatagcacacaaagtaatatagaatatatttttctcatagtcattcctttttttattcatgtttaacaagagtgataaatgcaaaacgagattcggcataagccttatattcacccgccttgctccacagaatcataccgcgagttacaaaatcagctttccttccgtcgtctacaaactcatattcgttgtcagaaccttctttcagtttgccgtacataccattcacaaaatcagttcctccatacgtcaggcttccgggattcaccatccaaatgctcaaataagcttcactaccgtccgtcaacttctgattcaggagctccatacgccgttctgccttattataaatcattgtcagatcaatcggcaacatacctttaattgtataacttttcatatcctctttcttcactaactcgatttccagagacaatacaggagtattctcaccacgtcggtaattcatcgtatacttacccaaatattgcgcgtaaatgatatattccggatcataatccactttcaacacaacatccggagcattttcagctaccagtgtttcatttgcagccgaccaagtaaagcggtgcagctctttgccaccaacttccaccggaagataaaactgtattcctgtcgccgtcggcatgaaagaagtagacgttttctgtccgtcatataccacattaaatgtatgggaatccgtataaagcagagccagttctttcccattcatcatgccactgaaccccaataccccttccaaacggttcatttcttcatccactcggatagcagcagccagataaggtgtagcatcttccgccagacgggtcatacgaattatatttttcgttttcttccctcgaaggacaatctcattctcagtatgcgagcgcaaaagaaattcataatcaccctcataccctttgcccgttcctgctcctccggatatatccgaatcagagaaataatggaacaagctattataagtgtcaaagttaagggtcggtccgatatccttcttaatagaaaaaaggctctcttccgtttcctccggtttcccaaaagcgtcagtagaaatagtcactttatcccctcctttaaacttcataatgtagttgaaaccaccatatatctgcgaagaatgcggataatactccattaaccacccgtgctcggaacttaccagcaaattatgatattcttgaacggcttcttctacccgctgggcaacaggtttatcgtatacatcatctacatcctgcacacacgaaaagcagacagtggcaaatgccagtaaagtataaatcagttttttcatattctcagcgtttgttttaataaatatgatccaaatccagttcactaatctcattagtacgacgtgcaatcactttgcgaagcagatcaaggtccacttgccaggaatctttcatatacttcttcaccattgccagcttttggtcaatgatcggtttacctttttctccagccagagtcataacattttcccactgtgcttccggataagtcaggaaacaggctgtcacttcagcaatatcctcactcggtttactaccggcatacggtgtgacaaatcccaaaggagcgacctctgccaatttacggttctgccaaccggtaggtgtataattacctgcactaatcttatcataatctaccggataattttttttctgatgcagaatgtgggcaaactcatgatgcatcaccttgaagtaatattcattcatgcggtcaacattcgtcaaatccagccagttccccatatacaaagtcactttcagtccgccttcggcagttcccagtgtatacgtccccttatcccacgaagcagaacctataagatgaataactttcggagcacaagcacgtgtaaaatcaagacctcccacttcatcataggcctccagccagcaatgtttcactatcttcgccaatttcacactcaaccaaaagtccgtaggtacaagattgtgcgtataatcggattcaatatgttccattctgtatttaaagtcgatgttatagggattgacgtagttttcgagtaaccagcggtcaaactcactcttttctttctctgatgcatcaaaaatactctggtcttccaagtcatcgtcctggcaggcgaagaagttgctgctcaccagaatacaaagcaaatatatataccaatttttcataatcaattctttattatctaacattaaactatcttggattaggctgcataccagcctctacgacagacgccggaatttgaacagctttacggaggtcgtgagctttcagcacaataggagattcgttctctatattatgggaaatctcaataccgaaacgcttaatatcctgccacctttccccttcgtgcaccgtctcaatacgacgggcatgaatgactgctttcagcaaatttgtctgtaatcctgcttccagagcaaacttgggatcaagtggtttaccgttagtcgtaggatctactgtctcataaaaaagattcagttcatctttgtcgggtactttagtagccgccttaatacgataccaatactgtaaatcgttcactgccttatcatattgcttagagagcacataagcctcagcacgattcaacaatgtcttatcagtggtaaaagcaaacgcaacctgacgtccataataactacctgtaatggcattggcaatctctttaaactggtccattttaggaacaaaaatagactggtcaccatatcccaagactgtttcatatactttcaaactaccataaggccccttcgaccagatagtctgtttctcacaaatctcacggctatgaccgtagcgataagccgatttatagttactcccccaccatgacatcgtttgctgtaacatcagattagccggttcgtcgctactaatgtatgccagcgtatattccatagaactgggaaattgagcatatcctcccatatttctcaacacagatgacgggtcctcaccaatagcctccgtagcataacgaatcgccttgtcgaacttattataaaacaaattgaattgtgcggcaaaagcataggctgcattctgattgaagtgatataagggaatatcataggcctcggaactaatcagcggtaatccttcttcaatatctttatcaatcatggcatacgtctctgccaatgtaccacgctcatattgtacaccgacatttgtttcgggagcagtgatatagggtattcccagattagtatctgcatcatccccataagccatacagaatattttggctaaagcaaaatgcccataggcacgacacatcagcgcttcccccttataaggctgcgcctcctccggatctcccagttcttcaatcgcctgcaatgcctggttagcagcagcaatcgcactataacatccattccataaataccttggcgtatcttgattgatatcggtcatttcttcccaatagtaaccctgcatcagtatattggaaggaaaaccatatttttctccattgtccatacggttgtccgacataaattcttccatttgtatggatgaagctgtagaataggcagacatcagcaaatctttcacttttctcacagagttcaattccgtacgctgatcgggcatggtatccagataactttcacatgaagtaatcatgcacgtcaatgcgagtgccagcaataatattattttatttcttgttttcatacgctttcaactatttaaaatccaactttcaatgtcaaagtaaactgcttgggcacaggtgccgacacaccaccggaacggaagaattcggggtcctgcccattcaatttcgagtctgcataaagcagggcaaggttcgtaccctgtattttcaatccgacactactgataggggtagacttcagccattctttcggaaaatcataagaaagagaaacctctttcaagcggacgaaagcaccactggcaatgcgtgcagtagaatagttatacgagttgtaggcaatactcaggttcgcatattgattgcgttcaaaagaactggccattacagggatgtccgtcaccttttcatcacccggcaacacccaacggttcttgaaatctttcggagtggcatccaagtcactatacgacgaacggaacatcgggtccaagcggactttgttaccaccggagtaagtgacaaatacatttaagcggaaattcttataggtaaagatattaccaatacttcctgttatagtcggatcggtaggaccttcatatttaaggaaatccacatctgtcgattgttgcaggttcagactgccatagtttgctttcgttacggtttttccgttaaaactgaatatcggaaagccatccgaatccaatccttcgaacggaatagaaaacaaaccgcgcaccggataaccttcacgggcaaacccaacgccggagatcaagtcgaatacacgcgaacgtgacttgaaatcggttacttccgtcttattatatccgaatatgaaatcggtagaccattggaagttacggctttcgatattgcgggtagagagagtaaattcaaagccatgggacttcatagaagctacgtttgccatacgttctaccgatccaccgacaccttgagttgtaattgcaccgatcaaatcataattatcacgtttgtaccacgcagcttcaagattgatacggttgtcaagaaatcccatatccaaaccgatattcatctcatgcttcttttcgtaggtcaaatcactgttttcaagatctacaatctgtaatcccgattcagaaacacctgccgacggacgccaaggggtatagctgttaataataatcttggagtttgacacattactcggacctacatcagccgtcaaactatacgaggctttcaatgtaaaatgagataaagcaggttctagtttcttgaaaaactcctcttcatgcatattccatgcaccggcaatattccaagtaggcaaccagcgggcagagcgtgactttcccaaacggttggagccttcataacgacctgtgcctgtaataatataccgtcccttatatgagtaagtggcagttccgaagaaagctacgttacgtttcttggtattagtaaggtcataatagtttgtattaccctcgcgcagtttcttgaaagcaaggtaatcaaagaaaggaatttcaccgttttcatactgcatcccccagccgtcaaagctatttgccgtacgattttgagcattcgattccatacctgcataaacgttgacaatatgcgtatcattaaacacatcattatatgaagcagcagcacggaagtcatagctcagcatcttatattgcgctgtattataaaaacctcccttaggcaagatagacaccggaagtgcataaggatcatccggatctttatacagccatgagttacggttgataatcgtgccatctcccatagcccggtatgccaatgcctggtttgagttttcgcgtattttgtgttcttgtgatgtggcggaatacttcaaggcgcctaaagcgctcagttccagtttgcggaaaagtttccatttcaattccgcctgaaacttcaaatcgataacgtccaaagagatattgttggcattcagttcgttgaaaatattaaaatcagaatagttacgcatataatactcgttcggatcaagggttctggaagtgttcagagcataactataaggattgatatcaaatccacggctcactgtgccggaagctgcatcagaactctgtcccaatgttcccggagctttctgctgacgataagaagcattggcaatcacgttgagcgacaagtctttgactatcttataactattattcaaattagccgtgtatcgttgcaccttattttgcaacatccagccgggatcgaccatagcacttactgagacataagaagtggatttctccgtaccggtagcataactgacggagtgattcatcataatggcattactgaaaagcaagtcgaaccaatcggtatttctatattcggcttcgcgcagataagcattctgagcttcaggagtttgagcaagaccatacattccgttggttttgtcataccagttattcaactgatacattttcccatacacaccactattggaagcacgatacacgctggcaaagttcaaatcacctttatcacgcatttctttataaattcccatttggtcttgagaattcatcaggttaaagttacggtaagacggcttcatccgcatagtaaactcacccgtgtaactcaacctacttgtacccgccttaccctgcttagtagtaacaacaatcacacccgacattgcacgcgctccgtaaatagaagttgccgaaccgtctttcaatatttgaaaactctcaatgtcatctgcattcaaccccgcaatagccgaactaatcaaagtaaccgcatctcccgaagataattgatcggcactgacttctacgacatcgtccataataacgccatctactacccacaatggtttggaattaccataaattgacgtggcaccacgaaccctgattttaggagctgtaccaaaggtaccggatacgttttgaacagatacgccggcagaccggccttccagtccacggctaatatcaggcagaccatccagctttacacttgccgctgtcaaacgatcggccgcaccagtaaaaagacgcttgtctacttttgtcatacctgtaaccacgacttcgtccagtacttcggcatccggctgcataacgattttcatcgtccccggtttaatggatacttcttgcgctttcatcccgatgtagctgattttcaaagttctagcagaacttggtacattgctgatcgtgaactttccgtctacattggtagtagttccgatagctgtgccctttactagtacggatgcccctacaacaggctgattgtcttcttctgaaatgacaacccctgtgattgttttaggtgtttgggcaatcgccagaccgattcctgctaataagcaggccaataacaacacaaatctttttttcatacgctcactagatatttggttaatataatagttgtctatttgcttgtatgctttttgcaaaaataagcacattttattaaaaacaaaacaaaacaatgaaaaatatatcaatttgtttgcaagttaatttgaaagaactctagcgaattcaattctcatgaatccacgtatattatgtgcttattaacattttgttattattaataaggtatatgattattctaagtacccataaaaccgaaatatcttctaccttaattccgcaacactattacaaatataactttttaagtacctgagcaacaaaaagttgctcaggaatttgccatgtcagatttttcacctatcttagtgttgcaaatcaaaatatgtatcaaacccgacagacatggcaaaggtagcaattaaatccgagaaactcactccttttggaggaatattttcaataatggagcaatttgactccagactctcatctgtaatcgactcaaccctcggtatgagatgcaggctgtatggttatcaatacagcgaaatcatccgttcgcttatgagcgtttatttttgtggcggctcatgcatcgaggatgtcaccactcatctgatgtaccacctttcgcttcatccgacacttcgcacatgcagtgccgacacgattcttagagccataaaggaactgacccaggataacatttcctacacatccgacactggcaagacctacgacttcaacacggcagacaagctgaatacactgctcctcaattgcctattgtccacagggcagctgaaagagggcgaggggtatgacgttgacttcgaccaccagttcatagaggctgagaagtttgatgcgaagcctacatacaagaagttccttggttatcgccctggcgtggcggttattggcaacttgattgtcggcattgagaacagcgacggcaacacaaatgtccgtttccaccagaaggacacgctgaagaggttctttgaaaggtttgaacaaaacaagcttattatcaaccgtttcagagctgattgcggctcgtgttctgaagagatagtggaagagattgctaaacactgcaagaccttctatatccgtgctaaccgatgcagttcgctctacaatgacatctttgccctcagaggttggaagaaagtggaattgggcggcattgagtttgagctggcctccattctcatcgagaaatggaaagggaaggcataccgtcttgtgattcaaagacagaagcggatagacggcgaactcgacctgtgggaaggagaatacacctaccgctgcatccttacaaatgactacgagtcttccgagaaagagattgtcgaattctataacctccgtggagggaaggaacgcatcttcgatgatatgaataacggattcggctggaacaggcttccaaaatcctttatgggagaaaacacggtgtttcttctgcttatggcactcatacgcaacttctataaattcatcatggcgaggcttgacgtgaagaggttcggactcaaagcaacaagccgcatcaagacgtttgtctttaagttcatctctgtgccagccaaatgggtcaggacatcaaggaagtatgtgctgaatatctattcatgcaacaatgcttatgccaatgtgttccagaatgactttggataacaccgacaacttatagtcgtgattttgcgtattgcctcaagtcgcatggtggggtaaggggcatttatatgtctttatggtgacattcgatgcactgtgccccctttttactaacgatgcagattcttttcgcttctgtatcatattaggcgcgtagttgcggatttgaggttctaaaagaacaagtttaattatatcgaaaatttgcacttattattttagggaatttaagaccggacaatttgtgatgagagtaaatcgtgatgaaaaacatctacataatttctgaaatacctttcctcaaatataaaaataaccagttaaaggtggcgtattacttaatgataataaaatagacatattgctgttattatgcaatatgattacaattatgagtaacatatatattctcgtaagcgttcgatatggagaagtatttttaattccttgcatttttattctgtatcctgtacttataccaaaatatttgcaaacagaaggaagcaaaataacattttgacagttatgctttaagttattttattgacaattattcccgaaattgtaaaatacagatgttacaatattaagttctgctagaactaaatcaatcggttatcccctttcataacaaatatacactaaacgttcctctccggattccttcttacgcggcagattatttctactaaaaaaaacaatgggaattcccatatagttacaggaatccccacttttcagctattttcagttcttaaacttgctactaatatgctaccgtcagcggagcacgtaatttctgagcatattcggccacgtatttattccaaacatccacagttttgatagcccccttattccaggcagaaccccagtaataagtatattcagaacccggttcgtattcgctgatagccaacacatgaccgtcggctccgccacgctccttcttttccttttcagaaagaagcaccactttagcctccttcacctgtgcagggaaagcagcaccgatgaatatcttgccgtttcctcccttgcggtcggtggtaggatctacataagtaatatagccattcgccgcatcggctgcaacaacgccgtccggctcacggagaacgattccggtggttacaggcattgcctctttcaggtttgtataagagattacggctttattgaggtacgaacccgcatccagagtaatcacacgcgtctctatcacattagaatcaccgcggactaccaacggattaaattccagtttcaccgtgaaacgcaacggaccattatcaaggatttcctgcgtgcgataacagtatggatagatgatcgtgtcgccctgcatcaaagcagccgtaccgcaacccagcgtaggacctacggcataacagtccattccataaccgtgatcgatatgataggaaatggctctttgcagttcagaagccgctttaggatctgtttttctcagttcagctatcttggcacgcttttccttattgagttcttcagcgtacataccttcaagaactggctgggtggtattgtacttcgtaaaaaggtcataaccaaagccacgttcacctcttgcctgcaatgcaggaccataagcacggtaaccgcccaggtcattctcccatgcaacgtcgtccagacgttcggaataatatttgccgcaggcaattacattgaaaggttccggagtgcccggttggatagtataagtggctgtaccattcgctttcaccgtaaccgggaaaacaaccttctcatcatacgtcacctgatacggaacttgctgtccgtctatgtcaagcaccacaatttgcgctgtatcggccagcttcaacttggcaacgacatcgctcatcggcacttcaatcatctctcccgcacgctctaaacccagcggattggtcacggtcactgtcataacctgcttgctttcgacgcaggaagcaaagccgataaaagcaacggcaaacagaataaatatctttttcatgattgattcttattaaataaaaaataaggtgacagatgaaaagagtatgctcttttgccattctatcaccttaccggatatagtttatcttacattatttcggttgttttccgatgtaagcaaggataccaccgtctacgtaaagaacgtgtccgttgacagcgttagaagcttctgatgcaaggaatacagcaggaccggtcaattcttccggatccagccaacggccggccggtgtcttggcgcagatgaatgaatcgaacgggtggcggcttccatctgcctgcggctcacgaagaggagcagtttgcggagtagcgatgtaacccgggccgatgccattacactggatgttgtattcgccatattcagagcagatattgcgagtcagcatcttcagaccacccttagcggcagcataagcagaaacagtttcacgacccagctcagacatcatagaacagatgttgataatcttaccggcacgcttttccatcatagcaggcaaaacagccttggaaacgataaacggagcattcaagtcgatgtcgattactttacggaaatcagcagcttccatttcgtgcataggaacacggcggataatacctgcgttatttacaaggatgtcaattgtacctacttcttttgcgatagtagcaaccatagcctgaacagccggttcgtctgttacgtcgcatacataaccatgagccttaattccctttgcagcgtatgcagccatacctttgtctaccaactcctgattgatgtcgttaaaacaaacagtagcaccttgttctgcaaaagcagatgcgatagcaaaaccgataccgtaagaagcacctgtaacgagagctactttacctttcaaagaaaaattcaaatactgattcataatttttttgttgttaaattaaggaaactattgtagttgtttattatttcaagtctgtaatcaatgagaagtcctgatcgccgtaatcaaggttctctccgcccataccccagatgaaagtataattgtgggtagccgcagccgaatggatagaccattcgggagagagcaccgcctgatcgcctttcatccagatgtgacgtgtctcgcctacttcacccatgaaatgacagatagcgtgttcttcgggaatttcgaaatagaaataagcctccatacgacggctgtgcacgtgggccggcatcgtgttccatacgctgcccggagcaagctcggtcatacccatttggagctggcaggtaggcaatacctggttcaccaacatcttattgatattacgatggttggagccttccaaagagcccatttcagccactaccgcatcggctttcgtcactttgcggtcgggatagttgcgatgtgcagtcagtgaattgaaatagaatttagcgggatgagaagcgtctttgctttcaaaggtcacttcacggtcgcccgaacccagataaagagcctctttataatcaagttcgaatacagcgtcgcctgccttcacgataccggggccgcctacgttgtaaatacccatttcacgacgggtcaggaagaacggagctttcagcggatcgattgcttcaagcgtcagtacctcccctaccggaaacgcaccgcctaccaccatacggtcgtacatggaatataccatattcacttcattggggacaaatatcttttcgattaagaaatctctgcggattcttgtagtatcatagttttttgcatcttcgggatgcgcagcatagcgaatttcatagttcgttttcataccttatttatttatagttattgaataagctctctttctcaaatgtacatcgtttacgtacacgatgcaaaaatagtaaaagaaaacgggttaacattacaattttgttccaattatccatcaaaaatgtccagatttgacgcaatgtacatctttttaacgaactataatacgatttgaggtagttttttacctaacgggaaaaacagagccactcctactctcataaaaacatcctcttttagcaataaatactcccggctattgactttcgcctttttattttgtatctttgagaaacagtaaaaaaagaaatagcacatgaaacgtacagaaataaagacataatcagtccaccacagcatatatttccatatatgcacaaacttctaatgggagaaagtcggtcatgattttctcccattttgtttaaatacttcgattcttatcgccaaagaagccgaaaaacgtttttaataaacttggataccgtttataataaactctccaattagttattaaaaacgctctctccgtttattataatgttgtaaggatattattgcagcagaaagtcaccttatccatagacaaacaggacaatagcagataatagttaatattctatacaagaaatagcagtacaccaaacagataacagcagagtcgacctgcataaaagaaaaaccccgaaagattactctttcggggcttctctgttggactaccaagattcgaacttggacaaacagaaccaaaacctgttgtgctaccattacaccatagtccaaacttatgtgctttctgttaaaaagcggtgcaaagatagaggtttgcaagcaaacctccaaatatttcgttcacttttttactttgccacctcgcaaatcgcgtattattacttcgcaatcagcaaataatagttctttttaccacgctgaacaagcagatatttctcgtcgagcaggtcagcagctgtaattacctggtcaaatgccgctaatttctctttattcagcgaaacgcctccgccttgaaccagcttacgcatttctccttttgaagcaaatacagccgcattatcaacgaataaatcaatcgccttcacacctcccgtcaacacgtcacgagaaatctcgaattgaggcacaccttcgaatacagccagcaaagtatcttcgtccaacttgcgcaaagcttcggaagtagcattgccgaacaggatattcgatgcatctaccgctgcattataatcatcttcagagtgaaccattacagtcacttccttagccagacgtttctgaagaatacgcaaatgcggagcagcctgatgttctgcaattaatgcctcgatttcttctttttcgatcgaagtgaagatcttgatataacgttcggcgtcggagtcacttacgttcagccagaactggtagaatttgtagggagaagtataacggggatccagccagatatttccggattcggttttaccgaacttaccaccgtcggcttttgtaatcaacggacaagtcagcgcaaacacctcacctccgttggtacggcgaatcaattccgcaccggtagtaatatttccccattgatcggaaccgcccatttggagcttacagccttttgtctcatacaaatgaagaaaatcgtagccttgaagcagctgataagtgaactcggtaaatgaaagtccgtcacgtgcttcgccattcagacgacgctttactgagtctttagccatcatatagttcacagtgatgtgtttacctacttcgcgaacaaaatccaggaaggtaaagtctttcatccaatcatagttgttcaccaactcagcacgattaggtacatccgactcgaagtcgaggaacttggccagttgattcttaatgcatgcctgattgtgacgcagtgtttcttcatccagcaggttacgttctgccgatttgcctgaagggtcaccaatcatgcccgtagcgccaccgatcaaagctaacggcttgtgaccgcagcgttggaaatgacgaagaatcatcactccacaaaggtgaccaatgtgtagcgaatcggcagtcgggtcgatacccaaataggcagtcacctgctctttgattaacaactcttccgttcccggcatgatgtcctgcaacatgccacgccatctcaattcttctacaaaattcatcgtattactcttttattattagtttttttattgtatttcaatcccgtgaggggcaaaagtacgactctttctcggaagatacaactcttacgccctaaaaaagatgtcttgaatatttttacggacaatagcctgcaacgtttctacttccacaccacgtactttcgccgcatcacgcaacacatcttcaatatctaccggactgtcatccgtttccaaaaacaagcggctatcaggcactacattcatcgcctcactggagtaatgcattccgaaagaaagatagaatcctttctgtaacaattgttttgcctgttcaggctttccacggaatccatgccatatccacggctgtttcggtgcacgttcctttctcaaggcaagcagttcgtccatagccttcacacagtgaataatcaacggcaattcatacttttccgacaattccacctgttctttaaacacagctacttgaagctgcatcggagcagcagccagcttatccagtccggcctcacccacggccaccaactgtttttctgcaagttgttcccgaagacattccaatcgacgctccgtatcaaactccgtcaaatcccaagggtgaataccggcagaatagaaatatccttcgcacaaagcatctgtcgccaacttacggttaataatcgccttcccggcagaaaccggttctgctttatgggtatgaatatccagaatattatttgtattcctttccattttccacattttggagtttaaggtacaggatcatagccggaaccaccccaagggtgacaccgtaagatacgcctcacagccagataaaaacccttaataggaccatgtttctttatcgcttcgaccgcgtatgccgagcaagtcggcgtgaaccggcaggagggaggagtaagtggggatatgcaaatccgataaaaatagataggaagcaggagcaggaatgagaacaccctcctcaaaaatcctttgacggacatccggacgccagacatccgggagctatgggctttcataaggatagtttttcggagatacgcgaaagcgctattttcattttttcttccagctcggcagtagcagtaagctcgtccgacagatagataaaggcaatagccaaacgcttttcccggcgttgcaactcgtctaccaacagatatttattcttccggtaggcttcgcgtatctgccgtttcacccggttgcgcttcaccgccctcttgaagcggcgtttcgatacactgatcaatatggaagccggagcctcgccttgttcgacaggcatatatacaacgcgtatcggaaagatggaaaacgacttcgaaacaccgccttcaaacatctttccgatcagaattttactattcagcctttcggctttgcacaaagtatatatacccactctgtttatttattgttttccttgataaacatgtcaagtgcggcagtcatagacggagcttgcaccgtaggggcttcgagatccagacggagtcctgcatcgcgtacagcctgtgcggtagtagaaccgaacgtaccgatcttgatttctttctggtcaaaatcagggaagttcttcttcaaagaagttactccggcagggctaaagaacaccaacatgtcataatcgaattcttcgtcgggtgtaaagtcattgcttaccgtgcgatacatcacagcttcggtatgctgtatgccgttcttgtcaagcagtgtttttacgtcgtcattatgtacgtccgacattgggacaaggtatttctctgttttatgctttacgatagaaggcacgaggtcctcaatctttcccgttgcaccaaagaagattttacgcttacggtactgcacatatttttgaatatacaatgcaactgcttccgtcacacagaaatacttcatagtttccggaattgcaacacgcaattcagtacacaaattaaagaaatggtcgatagcatgacgagaagtgaatataacggcagtgtggtcgagaatcgaaattttctgttgccgaaattctttcgccgaaagactttcaaccttgataaacggccggaaatctatttttacgccatacttctctgcaatgtcgtaatagggagatttctctgacgcaggcttaggctgcgacactagtacttttttaattttcaacgtcctaaaattttattagcaatatattgttaatttgaatcataccttgatagagtagcagacaaggtagtatttcaagagcgcaaaagtacaaaattaataggaaaagtgcgccaaattgatgaaaaaaaagctttatccacttataaaacatcaatattttagcaaaaattagaattatggttccaattatgagcaaattggtgagactcaggtcgaaataaactaaaaagagtacgaacggaaaaagggcaaatcctgcataatatatgagcgtagaataagattccagccatatatttgtcctgtttttatcaaagaatgtccaacctataaacatataaagcaaccatttcagtaagaagtaagcaagacaggaacccacataaatccccaaaagcagaagaggggacacggagttcatcaaagcaggggatgtatcatgaaaatagttgaagaaagtaatccccgacaatacgcacgtctgcactacaagcacaagaagataacgcatgtcagccgctgtagaactatcaaaaatacttgtccgttcacgatgcagcacaaagtcttttacttgctgggaaagaaatttctttccgcgtgccaaagctatggaagaaaggaagaaacaagccagcaaggttagcgctatggcatcatctgtacggggagaataggggataggagttccctcgaagccggaaatgacttcctgcgcagaatggatctgtgccaattgcaagctatcactatccgcctttattgtcgattgcggtgaaccaccgagctgcccttgttggaaaagcgacagagtatccgtagtgcgctggaagctgagagtgtcaatcgtcatatagctgcaaatttacgaatggagatatcccatacaggcgttgaataaagcagttccacagcttcctccggcgtttgcgccactttccatatatcaccgtgctggcggcgcataaagttttcgtcgattgctttttcaagcatttcgagtaacggatcaaagaacccgtttacattcagaatcacaatcggattgagatagagtcccagttgtttccaggtgataatttcaagcagttcttccaacgttccgcagccacccggcaaagctatcaccgcatcactcaaatctgccattttctgtttgcgttcgtgcatggattccacttcaaccagctccgtcaagcctgtatggtgccagttctgctctaccataaaatgaggaataacaccagtcacctcaccaccattcgccaacaccgcatcggccacagaacgcatcaggccaatactgccggcaccattaatcaaacggatatgatgatcggcaagcagtcgcccgagagtctcggctgcggtaaagtaaacaggatctattttagtgctggaagcgctatatacgcatacggaatttatctggttcatcagtttctccatgattttattatatcatgggcacaaaattacgaaaaaatttggtatttgtccactacctccggaagcaatcttgggcttcttactcggaagcccaagagcctttctcacagagaatacatctattatcaggtatttcacctgtacagatataccgcaattgttgctgaatgagcctatcgttcgaatcaccagactactcgaacaccctaccagtctccagaccaacaattaagagtgattttaatattgcatcctgcaatataacaaacatttattgcacacctttcacaagggttatcaagtcccccaatcagaattagccgattctttcccctgtcagccggtatccgatcgtcattttaacaatgcactatattatagtggggcttttgtatagttaattatcaggttaatcttctagttacagattgattctaaggtttcaattttccagttcaaattctccggaaaatacttccgtaggaagctgtatttccaaagtatatttaccttttcactggtaagatcaatattaattttatctacattccattcggtagatgaataaacaactttgccttctgcatctttcacaacaactgttgcagtagggacagtagaaagtaagtcaatagtaactaatgcgtcctcaataaaagcaacaggcgtaataggaatagaacgatgctgtgccggagtcttagttcttaattcaatttgacgtgcagatttcatctcccgtgcaaaagaggatgtatttacctgaagcaaaatagttaataatagaagaagtaaaaatttagttttcataataatgtgggtttaaaatttcgcctcaaatgtacacagatagagtaaaagaaacgatttttatgcggtaacaatggtaacagacttctgtctatatagaaaataagtaataacattcttagcatatcttacagattatcaatattaaacacctgctcaaatagatatgtacccattttatttttaatacgatttttacgtgtcttaagagcatctgatgtagtattcatcagctccattattacagtctttgaacaatgaagtgaggaaagaatgcaataaaacaaatcatcattggtcaaagacggacagcattctttcaagttcaccatcacgtcaacaaatgcttcacaaatagcaatacgcatatcaactctcaaaccacgcatagctaacagttgtttaggagtcgatttctcgaatgtttctaatttattataacaatcagtggattgaaacatagatatacacaattttaattgttgttctctcaactttgacattttatgttctttattagatgcagaagattcttctttaagtagcatagtatctacacgtttctgagtgagttcttgctgcaaagcgatataacgtttctttctccttctatcattccacatgaaacaaaagacacatattattgtcaaagaaagaaaaacagagactaaacttataaccaacgttttagtacgctgtgataatatccttttatgttcttctatttgatgtttatccatcagccgctttagttcttcattgtctgttaacacctgaattgaatcataaagagttttataggcatccatattttccattgcagttcgccattcctctcgtttctttgctacttgatacattccgtcataacaaacagcttttccataaatatcaaacaaatctatatctttactaaaatagtagctggcagaatcaagttcgttcagattaaacataatttttgctttcaacaaacaagcattagccgacctatcctgccccaatgctataatagcttttgatatatatttatcggcttgaatgtaatcttcttcttcataatagaccatagctaaatcatgataaagtggtccgatcaagttggaatcttgtacaaccaacgcataatcaagagctttttgataatagcataatgcactatctctgtcactctgagaaaaatatacgtttgcaattcctcgcagtggatacgcctgttcacttcctcctttcaatatctgataagctttacgataagcctccattgctacatcatccaagtcttcttcctcatagcattccgccaaattatcatatatcattgccaagaactcattttgttcaggcattagtcgaatcgctttcagatattcttctaccgcaaaggaggtacgtcccatatcccgataagtggcgccccaataataatgagcctgtgcagcgcgtaaactcttatctctgtcaccataataatcgacagctgcctttatcagcgaatcatcatctaaaggtacataattcttatgccgtgcctgtgtaagcaacaatgcataaagcgctctatcagcacgtgacagcttctgtggtgaggaaattgactccaaaatagataacgcactatcaggacttacctccattaacgagtcggcacaaagcagtaacggattcttcacagaagaagaacaagaggatagagaaacagatagtaaaatactacccataccgataaacaaaaaggcgaatagtggaaagtagtatataaaatagtcgtatttctttttcatctcacggcttgttttacttcttaatggaacaaaggtagtgatttctagtagaaataaagagccgcaatcccaaattccataaaacggaagtgagattgcggctcttatcgtataaaccctctttcagactagcttacagaccgaaagctgctttaatcttatcaacgtagtcgagtttctcccatgtaaagagttccacttccactgttttgtcaccttcataacgagaagaaaacttcttcgttaccacttgtggttcgcgtcccatgtgaccataagctgccgtttcctgataaatcgggttacgaagtttcagacgttcctcgattgctttcggacgaagatcgaacagctggtcgataacgcgtgcaatctcgccatcagtcatgttcacatgagaacggccgtaagtatccacaaaaatattaatcggacgagccacaccgatagcataacttacctgtacaagcatttcgtctgccacacctgctgcaaccatattcttagcgatatgacgagctgcataagctgcgctacggtccaccttactagggtcttttccggagaaagcgccaccaccgtgagcacctttaccgccgtaggtatcaacgataatcttacgtccggtcagaccggtatctccgtgaggaccaccgatgacaaactttccggtcgggttaacatgatagacaatcttgtcattgaacagagccagcactttatcgtgatgaatagaagcaatcacgcgaggcatcagaatttcaatcacatcacgacgaatgatagacagcatttcttcgtcagctttcaactgagcggcttccgagtcattctccggctgaataaaatcatcatgctgtgtagagacaacaattgtatcaatgcgaacaggagttccgttatcgtcatattcaatagtcacctgactcttggcgtcgggacggaggtaagtcattaccttgccttcgcgacggatgtcggccagcacttgcagaatacggtgtgccagatcaagagaaagcggcatgtagttttccgtttcgttcgttgcataaccgaacatcataccttggtcgcctgcaccctgttccatcggatcctgacgttctacaccacggttgatatcgggactctgctcgtgaatagcggaaagtacaccgcaagagttactttcgaacatgtactctcctttggtataaccgattttcttaatcacctcgcgtgcgatgagttgtaggtcaacgtacgcttttgttttcacttcacccgctaatactacttgtccggtagttactagtgtttcgcaagctactttcgaactggggtcgtaagccaacagtttgtcaagcacggcgtccgatatctgatcggctaccttgtcggggtgtccttctgacaccgattcggatgtaaataagtatcccatctttcttaaattaagaattaaaaaataagaattaaaagatgatagagcaggagaggtgagtagtgcaaatatatgccgaaagacatcaacgagtcgtgttttagcatttttttctgtggttgcaagctactcaaatctgtccacactttcatttcggttgcaaagataaagagatttcggagattatgagtatctttgggcggtatttaacacaataatagatttaaaatgattctaaataagaaagtaagaacgcttttcgcactggcgctctatatcggatttacgattgcgatttacgccattgtctgtcatttcatccaccgtgagtttcaagacattcacctgctttatgccatattgataggctgtctggcttatctgccacgatttattgccgacaggaagaagaaatgagctcttttatcgtccttcccaataccgggtgtaccacgtccggcgcaatctccgccagtggccgcatcacaaaatcgcgctccgtcattagagggtgggggagattcagtgctgctccggaaggagaagtaacagagagcaccagatcatcgtaaagcaagaggtcaatatcaatcagacggtcgctatatactccgtcaacagacttcttggtgcgccctaactcccgttcaattagttgcgtctcccgcaatacctctaaaggagataaatccgtgtctacacaagcggcagcattcaggaaactgttttcagaagcaaagccccacggagcagtaacgtaaaaagcagacagggaaacaactttccctatctgctcttctattttctgcacggcatcccggagattctgttctttatcacccaggttagtaccgagtcctacatatacttccgccattatttgtccaaaatcagcattgcatcgccataagtaccgaaacggtaaccttctttcaatgctacgtgataagcgtccattacctgctcgtatccgccgaaagcggctacaatcatcaggagtgtagaaagaggcatatgaaaattggaaatcatcgagttagccacagtaaattcgtacggcgggaagatgaacttatttgtccaaccttcaaattctttcaaatgtccgtcggtgctgactgcactctcgatagcccgcatcaccgtagtacctaccgcacatacgtttctaccggtatccttggcacgattgacagttttcaccgccgcttcgtccacaagcatctgttccgagtccattttgtgcttcgtcaagtcttctacatcaatgtcacggaagttgcccaggccggcatgtaaggtgatataggcaaagtctattcccttaatttccagacgtttcatcaattcacgactgaagtgcaagctagctgtcggggcagtcaccgcgccttctttcttcgcgaagatagactggaaacgttcggcatcttccggttctacgggacgattgataatagagtgggggagcggagtttcgcccaaagcatacaaagccttcttaaattcatcatgcggtccgtcatacaggaaacgaagcgtacgaccacgagaagtggtattatcaattacttcggccaccattgaatcatccggaccgaaatacaatttattaccaatacggattttacgcgccgggtctacgagcacatcccacagacggagttcttcgttcaactcacgcaataagaatacttcaatacgagcacctgtcttttctttattaccgtacaaacgagcggggaacacctttgtatcgttgaatataaacacatctttatcatcaaagtagtccaatacatccttgaacatcctgtgttcaattttacctgtattacgatgcaataccatcaaacgcgactcatctctatacttcgtaggatgcaaagcgattttatcctcgggtaacttaaatttgaattgtgatagcttcatatctattccttattacgttaattattttcttcatcattttctatctcctgcccgtcgatccactctttaaaaagtgcgggatccaaacagtcttccaaacggacatcgcctacacgggtacgaatcaaccctgtgagatgagccccgctatggagcgcctcgccaatgtcgcgtgccagtgcgcggatataagtccccttgctgcataccacacgaatccgaatcatcggttccggttcttccaaacggcattccaacaattcaatctcgtcgataacaagctgtttcgcctttagttcgacttcctcacctttacgtgccagctcgtaagcacgcttaccgtccaccatacaggcggaaaaggcaggaggtacttgttctatcgttccgataaagtgcgtcaacacttcttccaccagttccctcgtgatatgtccggtagggtaggtggcatctatctcatgctccaaatcatacgacggggtagtagcacccaaccggagtgtcgcaacgtactccttcgtgtgatattgaaactcttcaatccgctttgtagccttgcctgtgcatacaatcatcacccccgttgcaagagggtccaacgtgccggcatggccgacctttagttttttcacccctatccggcgacagatatgatagcgggcgtgccctaccaccttaaatgaagtccagccaagaggtttattaaaaaacagtacttcgccttttttaaaattcatcagctcaatataatcgttaccaatcctgctatcgcacaatagattgcgaaatagatcagctttcctttcttcactatgtttatcatccacttacaagccaggcaaccggctatgaaagcagccataaaacctacaatcaacgacaatgcaggaatgtctcccactacgtcctcccctttcatcatcttcataccgtcaagcaatgcctcacccagaatgggcggaataaccataaggaaagagaattgcgccaacttcgctttgttgtctcccaacagtaatcccgtagcgatggtagaacccgaacgggacaatcccggcattactgcacaagcctgggcaataccgataataagcgcatctttcatcgagattttttctttttgacgcggcttgtaatagtacgagaaagtcagcaaggcagccgtcaacaacaacatacagcccacaatcagcagtcccgagccaaatatttcttctacatagtctttaaagaatactcccacaataccgattggtatcattgagatcaatatattaatcacgtagcgcgtctcctcattcatccggaacttgaataacccgcggaaaatccaatctatctctttccaaagaatcaccaatgtactgcataccgtagccacatgcactacaattgtaaatgccaaattctcttcaccctgtatcccaaacaatgccgacccgatagccaaatgcccactgctacttacaggcaaatattctgtcaatccctgaatcagtccaaggattaatgcttccaaccaactcataacttatctttattctattttagttttaggtttgcgcaataccgcataaatcatcgacaagaaaccgaacaggcaaacgacaggcgccaccttaattctacgtgcactgaaaatatcaggttcaaagatcgtttcggacgacgaaggtcctgtcatcaatagaaacccgataataacaatcgccattcctaccgctagcaagataaagttcactttatcaaaggcaaatttctgcttgtcagacatagtttgtttaattataaattcaaaattaaagtcgcgaatcacagttcgctatacctatttactatctattctctactaaatataatacaaggtattggccctcattctcaagtatttgttaatggaaatgtaggcacacagccacgtaatcaccattccaaacaccaacacactcgcacaaacgataagcatgacttcgggagtgattacctgaagcaattcctgctcgtatgtcactgcccaataggccgtccccattaatatggcatcggcaactacggcagccagtacgccactccacacattccttcggagaaacggtcgccgaatgaagctccagctcgcccccaccagtttcattgtatggatgaggaagcgcttggagtatatagcaagccttatcgtattgtttatcaaagcaaaggagataaaagtaagcactaccgccaaagccagtaataccagactgatattccgtatgttatcattcacagcatcaatcagctccttccggtagagcacatcctgtatattactgttccgtttgaccattttctcaatcttcgcaatactgtcggaattagcataatcggaatggagctttatttcaatagaagcggtgaaaggattataacccagaaactcttcaggatcagttcccatagcttcggtctgctccttcaatgcctgttttttagagatatattcggattgtttcacgaaaggttcctgattcagcttcttctgcagtttcaggatatccgcctctttcatatcgtcgctaatgagaatggagaaactgatattctcgcggacatatacggaaagattgtgcgccgtaagcacgaagaacacaaccagccccaacagcagcaacaccagcgtggtactgatactcgacgtaataaactgcatatcgaaaatcgaacttgacttatatctgcttttatttcccatcctctacctctttttccgaaaaacgtaaatcatggaactgctccgctccttccgtcccaaagcgctgaaccatgccaatgttccgacatacatccctttcaggaaactacatgaactaccccgatgtttctcacttagcatggatacgtaaaaagcgtcaaacggcatcgggtgacgtgccgccataataaagccatgccgggaagccaactgttggatagtgcccggtgtgaaatgccaaagatgtcgcgggacatcataagccgcccaatactcgccgtaacgttgcgcatcataagaggaacagttgggcactgccacaattagcagtcctttttccgtcaacatctcgtgaaactgttgccacacctcgccgaggtgttcaagatgttccataacgtgccaaagggtaatgacatcaaaactgccgggagcaaactcttgcagagccgattcgggtttcacctccagtccgaaatgttcctttgcaaactcacgtgcctgcggattcttctccaccgcctccactttccagccacgacgcaccatcgtatcggcaaaataaccggtacccgtacctatatcgagcaaacgccccgtcttgcgatgcgcctccttagctaccagccgcgccttgcggcccagcatataggaacgtacatagtgataaacggaattcatcgcgcctttgcgcgtatcagtgtgggagatataatcaggagtctcataatacttacctatctcagcctctacgggaacaccttgcgtgaacgtaaatccgcaatcttcacacgaatacagttcaaactgttcgcccgaagcataaaaatccgtacaagtcatgacgcgtttcaagtgcgtactgccacacaccggacaagcatttatactgagtttctccattaatttctaagcaaaattaagtgctgcctcaaaccacaagacaacactatacccgaatttggtgcaaagaaacaaataaaaagtgatgtaatgggcttttgttaaggacttttaataatacaaactgaccttgctctgatataagttgtataaactaaaatctatataacagagcaagacagttatttacgtcagggtaggacgcttgctttaagaagtttaagaagattcttttcttcatatcaaccaaccgaattaaaagatccccatcttctttgccatcctcattatacgaatataaaagaatagaatcatcaaatatttcgactatgtaacctacataaaacttgtccatgtcattatcaaaactatgtcaaatggtatctctacttcaggaacaagatgacaaaaagtaatggcgttgcggtaccgcaacgccattactttaaaatcattataacttatcaccaaccatttttggcaacattacccacgatataatcaccctacaaacattcaaacattacatacgcgcaggaacacaaatttaaaacttacacttcctcccctttcagcgtagccgaactggcttccgtgacacgcacgttgacgaaatcaccgacacgatgcgtacccctatcgaacactacgacgcggttttgctccgtgcgaccgaacagttggtcgcgcgaacgcttggagactccttccacaagcacttcgtaagtttttccgatgcaacgctggttggactcagccgacaggcgattctgcaaagcgataatctcattcaggcggcggactttcacatcttcgggcacattgtcttcgagatgtttggaagcatacgttcccggacgttcggaatatttgaacatgaaagcagcatcgtatccgcactcttccatcagggagagcgagagagcgtggtcttcctccgtttcggagtggaaaccggagaatatatccgttgtcagtccgcaatcgggaatgatacgtttgatagcggccacacggtccagataccattctcgggtatatttgcggttcatcagtttcaggatacgggagctgccgctttgcacgggtaggtggatatgcttgcacacattgggcacttgcgcgatcacttccagcgtttcgtcactcatatccttcggatgagaggtagtgaaacggatgcgtactcccggagcagcttcggccaccgtgcggagcaacatcgggaaggtgacgatttcacctgtcggcttctcaaaacggtaggaattgacgttctgccccaaaagtgtgacttccttgtagccttttgccaccaagtccgacacttcgttgaggatactttccacgtcacggctgcgctcgcgtccacgggtgtagggcacgatacagtaggtacagaaattgttacagccacgcatgatagacacgaatccggagatatgattgccgcagatacgtgaaggaatcacatcccgataggtttcggtggtggaaagttcaacgttgattgccttctcgccggcttctacggcggcaatcagatcgggcaacgtcaagtaagcgtccggaccgaccacaagatcgacatgatgattcgttatcagatcatccttcactcgctcggccatgcagcccagtacccccacgatgagacgcttcttctttttcttcagcgagtggaaaaactccaggcggttcagaatcttctgttccgcattgtcgcggatcgaacaggtgttcataaacacggcatcagcctcctccagcgtttcagctacggagtaccccgccatttgcatcactgaggcgatcacctcactgtcggccacattcatctggcagccgtaggtttcgataaacaacttcttgttgtcatcagcagttgcggatttaaagtccgctcccgttaattcgttcatattcaaatcttatttaaaaattcgactgcaaagatacggcttcggtttttaataagtggtgaattgatacaaaaataacgcaaaaacttatagtctggcgggctaacttgtaattaatgttaagagaataaacattttccagtcagtttcttggcaaatttaattttatttttcacatttgtgcaatgaaagaaacattagattttttcatagttaaggtttaggttaaaaaaattaaggggagctgtgaagctgcccttttttcataactaaatgttagctcaaaccagataaaatgcctacctttggcggacaactatttagaagtgaagcaaaatggaagattttttgaaatttctcttgatagcaggtgtcattctcgtgggaatattcaaagaggtgaataaaaatagcaaatcgaagaaagctaaaaataaccgccccgtcccgccgacaccctctcccgtcgaagtagctcccgacgccactcctatgcccgaagcctggggcagacccaggtcgctggaagaactgtttcagccgattcccgcagagcagcggacgcgcaaaccgaaagtaaggcagcaggagtcgaaaccgaaaaagaaaaaagaagaagtatccgttgccgcctctatcgccaacagtgccgcacaggatgaacgaaacagccggcaaggtgcccactataacacttcccacgattcacatgacaacaaagaagacttcaccattcattctgctgaagaagcccggcgcgctattatctggggagaaatccttcaacggaagtattgacaagtgtcaggtgtaaagtattagatatcaactgtgtcaggtattaaacattgagcattacgattcgagtatcaggttccgccctgaatgtcaacatattgagcgaattattaaccaattaaatatcaactgtatttaacacgaaattgtactatttatgtcattcaatcgtatttcagcagcagaagctgcaagccttatcaaacatggctacaatatcggcctgagcggatttactcccgccggaacggccaaggctgtcacagccgagctagcaaaaatagctgaagcagaacatgccaagggaaacccttttcaggtaggtatctttacaggtgcatcgaccggtgaatcttgtgacggcgtactggcacgtgccaaagccattcgttaccgtgctccttacactaccaattccgatttccgcaaagctgtcaacaacggagaaattgcctacaacgacatacacctctcacaaatggcacaggaagtgcgttacggcttcatggggaaagtgaacgtagccattatcgaagcctgcgaactgactccggacggcaaaatctatctgacggctgccggcggtatctctccgactatctgccgtttggcagaccagatcatcgttgagctgaacagcgcgcacagcaaatcctgcatgggattgcacgatgtgtacgaaccactcgacccgccttaccgccgcgaaatacctatctacaagccgagcgaccgcatcggactgccttacatccaagtggatccgaagaaaatcgtaggcgtggtagagactaactggccggacgaagcgcgctctttcgccgctgccgacccgttgaccgacaaaatcggacagaatgttgccgacttccttgccgcagacatgaaacgcggtatcatcccgtcgaccttcctgccgttgcagtcgggcgtaggaaacatcgccaacgccgtactcggtgcgctgggacgtgacaaaacgattcccgcatttgaaatgtacactgaagttattcagaactccgtgatcggtttgattcgtgaaggacgtatcaaattcggcagcgcctgctcgctgactgtcaccaacgactgtctggaaggtatctacaatgacatggatttcttccgcgacaaactggtgctccgcccgtcggaaatctcaaacaacccggaagtagtacgccgtctcggtgttatttctatcaataccgcaatcgaagtcgacctgtacggcaacgtaaactcaactcatatcggcggtacgaagatgatgaacggtatcggcggttcgggcgactttacacgcaatgcttacatctctatctttacctgcccgtcagtagctaaggaaggtaagatcagcgctatcgtgccaatggtttcccacctcgaccacagcgaacactccgtgaatatcgttatcaccgaacaaggtgttgccgaccttcgtggcaagagcccgaaagaacgtgcacaggccattatcgaaaactgtgcacatcccgactacaaacagttactttgggattacctcaaactggccggcggcaaggcacagactccgcacgctattcaggctgcactgggcatgcacgcagaacttgccaagagcggtgatatgaagaacactaactgggccgaatacgcccgataatattccgattttctattcacctaagtctgaatataaaaagaatatgaaaaagatagctgtacacagtctgcttctccttattatattagggagcggcaggctgcaagcagtagccggtcctgctgataaaatccggaaaaatatcgaatgctatttcaacgactatctccgtggagaaacgcctttatatgaaaagcaccagtcattcagtcttctcaaagtatcggcctaccgccaattggtatgggaagcttggaaaacagccaacgatgagctggacgaagaaaagctaatcgccctggatacgttatccgcttccagcaagggaaaatggcacctccccaaagaactggaacccaacgctatcatgccctattattgggggagcaagggcgcggaaaaacccgcagacggttatccgatgtatctctacatacacggttccggtcccaaacaggcggaatggaaaaccggcctgaacatctgttcgcgttttgacgacgctccttccgtctactttatcccgcaaatccccaacgaaggaggttactatcgctggtggcagaaagccaagcaatacgcttgggagaaactgttccgccaggcactagtatccgggcacgtcaatccggataaactgtttatcttcggaatatccgaaggtggatacggcagccagcgtcttgcctctttctacgccgactacctggccggggcaggtcccatggcaggcggagaacctttgaagaacgcccctgccgaaaactgcgctcacatcgccttctccctgcggaccggtgccgacgaccgcggcttctaccggaacatcctcaccggctacgtgaaggaggaatttgaacggctgcaaggtctgcatcccggactatacaagcatcacatagagctaatccccggcaaagggcattctatcgactatcgtcccaccactccgtggctgaaacagtatacccgcaacccttatccgaaatatgtctactgggaagactttgaaatggacggcttgcaccgcaaaggattctacaatctctttgtcaaagagcgcccgaatgacgatatcaatacccgtacccgctacgaaatgagcattacggacaaccacatcacactgaatgtggataatgtcgtttatgagaccgttcagaaagatccgaggtggggcattgaaatgaagttcaggaagaattacacgcctgccgccaaagggaaagtgattatttatctatgtgatgagctggttgacttgaagaaggaaatcactgttacagtgaatgggaaacaggcttttcagggaaaggtaaagccggacctgaagaatatggtgaacagttgtgccgcattctttgatccgcagcgcatctatcctgccgccattgaggtgacattataagccgataggcagagagaacgcctaacgcctgataatcacctcgcacaccttatcctggaaggctctggcctttgcagccgaaagcacattctggttcattatggcaaaggccacttcatgtccgttcttcatcttcagatagcctgcaagtgtattgatagctgtgaacgagcccgtcttggcatgaacattccggaatgtggctgcgcttttcatcctgtttttcaacgtaccgtctatgccgcctacgggaagagacttgtatagcatacggaacacttctgtccgggaatatgcatatttcaggaagtcaaccaacagggcgggggagaggtagttgtaattggagagtccgcaaccgtccgcaatcttatactctttcgggttgtgtcccagctggcggatgagctgcatgatctcgacgattccgtcttcggcagccacctgcttcttccctgtcgcctgcgcgccaaggcggcagaggaatgcttcggcattcaggttatcgctctctttcattagttggttcaagacttcctgcacggaagtattccaacaggctatccgttccacttgcacactgtcacggggtaattcggcgaatccgtatgattggggagccgtgatacctttcccccgaagacgctcgaggaaagtgtgcataaagaaagcggaagaatcatagatgtttatatcatcctttctaatggaagtaacattgcccgaaacaaccagattatttccattcctcaaccaatctcttgagaaggagaactttccggcagaggaagtacgtgtctttgtccggttcgtcagggtataataggaggaaaccggtttacaggatatgcttgccgtatctccctgcacagcggaaggaaacacggaaatctgtaccgtgcctttacaaaacatcaacggagacaagtaaggctgataacctgcaggagtatcgtcccaagcccagccatgcccccaatagagcgagtctttcatcgaaacgtcgccatacacctgcccgttaatcacggagaaaggaaaagtcatcacttcctctatcaacgaatccattgcctgactgtcaaattcggggtcaaatccccctactacatacaggttgccttgcagtgtatcgtgttctatcacaccatcgtgccatacttccgtgcggaaaggctcatccgcatcaggacgggagagagcggtaatggccgtcaacagtttcatggtagaggcaggccgggagagcttgtctgcacggtagctatacaacggcttcttcgccgtcaggtcataaacggatatgccgacttcggacgcttcgggaagcatctttttgataagtgaatctatttgggagaaatcccgctgtccccacaacggcaacagacagacggacaacgcaactaataaaagaacttttttcatacaatacaggttatgaatcgaaccacacccgcaaatatagcacttcccaactgaataagtctaaaatctgacaaaaaacaaaagagggtatctgaaaactggggtgacaggtggatgcacaatgctgataataaataatttatgcatctacctaccacctccccctacgggtactcctccttccagaaggaggagaatggagatactattgactttttagtcagtctcttttctactatttcagattcttcttcaccttttccagaagtgaaccggaaccataaccggaccacatatcttgtatcttcccgctaggagcaataagcacataatgaggaatccctttcacctgataactcacagcaagtcccgtacggcctctgcgaagttcattccactggttgccacccattcctttcgtcttaacatattctttccagcgtgctttcgggtcttcactgatactaatcacggtcattctatccttataagtttctatgaccttctccatttccgggatcgactccacacaaggaccacatccgctactccagaaatccagcaaaatgaatcgtcccgcaaattcggatatatggcggagagagtcattcacgtcatatagttctccgtcaaccatcatatctcctattcctgccacagaaggaggataaatataggccgtaatctcctgtccggcatccgtttgcttctcggtttccggcattcgagcatacaagctcttcacttcttccttataaggcatgacagtttcgtatttcatcatagaagcatatagcagcagcttatctatccacactttagagataggcgcctctttcatatattcaagttcctttttccagatttcttgccgtaaaggcgttgtcaacttccggatagagtctatctttgcccagcctttcttttcaaattcctgatcgcctgcatggtctataaacatcatccgctgccagtcatattcggccgccaaatgctgcatcagttctttttgctgagccattgcacaagccgtaaagcgattttcttccgcctgttcggggatatcgctcaccacttcccaagttttcagtaatttgtcctctcctttgatttctatatactcccccggcgctatccatacttccagccatgtgcccgggaatcccttattatcagacattatcagcattttctttgtaacagagacagtatcccggaaagaaaacttgccattcagaagcgtatctctcgccacaaggttgaaaatgtttccttcatccacatacagccctatcactatactatccgaaagatttgccagctctccctgaatcaaatattcgtttgccggaactgttgctttccggtcggatgtacaatgacacatcatcaccagcaccaccgccaataaaaccggaacaattatatattttctcatataccttaattccgcaacactattacaaatataactttttaagtacctgagcaacaaaaagttgctcaggaatttgccatgtcagatttttcacctatcttagtgttgcaaatcaaaatatgtatcaaacccgacagacatggcaaaggtagcaattaaatccgagaaactcactccttttggaggaatattttcaataatggagcaatttgactccagactctcatctgtaatcgactcaaccctcggtatgagatgcaggctgtatggttatcaatacagcgaaatcatccgttcgcttatgagcgtttatttttgtggcggctcatgcatcgaggatgtcaccactcatctgatgtaccacctttcgcttcatccgacacttcgcacatgcagtgccgacacgattcttagagccataaaggaactgacccaggataacatttcctacacatccgacactggcaagacctacgacttcaacacggcagacaagctgaatacactgctcctcaattgcctattgtccacagggcagctgaaagagggcgaggggtatgacgttgacttcgaccaccagttcatagaggctgagaagtttgatgcgaagcctacatacaagaagttccttggttatcgccctggcgtggcggttattggcaacttgattgtcggcattgagaacagcgacggcaacacaaatgtccgtttccaccagaaggacacgctgaagaggttctttgaaaggtttgaacaaaacaagcttattatcaaccgtttcagagctgattgcggctcgtgttctgaagagatagtggaagagattgctaaacactgcaagaccttctatatccgtgctaaccgatgcagttcgctctacaatgacatctttgccctcagaggttggaagaaagtggaattgggcggcattgagtttgagctggcctccattctcatcgagaaatggaaagggaaggcataccgtcttgtgattcaaagacagaagcggatagacggcgaactcgacctgtgggaaggagaatacacctaccgctgcatccttacaaatgactacgagtcttccgagaaagagattgtcgaattctataacctccgtggagggaaggaacgcatcttcgatgatatgaataacggattcggctggaacaggcttccaaaatcctttatgggagaaaacacggtgtttcttctgcttatggcactcatacgcaacttctataaattcatcatggcgaggcttgacgtgaagaggttcggactcaaagcaacaagccgcatcaagacgtttgtctttaagttcatctctgtgccagccaaatgggtcaggacatcaaggaagtatgtgctgaatatctattcatgcaacaatgcttatgccaatgtgttccagaatgactttggataacaccgacaacttatagtcgtgattttgcgtattgcctcaagtcgcatggtggggtaaggggcatttatatgtctttatggtgacattcgatgcactgtgccccctttttactaacgatgcagattcttttcgcttctgtatcatattaggcgcgtagttgcggatttgaggatatatatctttttatggtatataccggattacaatgcttcccggaatatctcacccaccgttggatgagggaagacaatcttcttccattgcgccgccgtcaacccaagttcaatggccgttcctgcaagggttattatctctgaagccgggttacccaacacgtgcgctccaatcacccgcccctgttcatccagcaacaccttgcaaaccccgttcactccttcgttctctgctacaaaacgaccggaataagccattgggagctttatgacttgacaagtaatgccttttgctgaagcagattcttccgtttcacctaccccggcaatctccggattggtatagacaacccccggaatggcacgatagctcatagtgtcttcttttcccaaaatagaatgcacggccacctctgcttcacgaacggctgtatgagccagcaaggagaatccggtcaggtcaccgcaaacataaacaccaggcacggaggtctgcatcttctcatccactttgacagccccacgttctgtcttttccaaattcaggttttcgagcccgaaaccttttgtcacaggacgacggccgacactcatcaacagcttctccgctaccacactgccacttccttccgcattctcataagagacaacagcagctccttccatctgcgacaggccgacaactttcgtactaagcaggaatttaatgcctcgctttgcatattccgcacgcaacagagctgaaagttccttatccattccgccgagaatctcatccagcatttcgactaccgtcacttgcacgcccaagctattgaagaaagaagcgaactccattcctatcactccgccaccgacaatggccagagaagcgggcaattctttattatccaacgcgtcccggtgcgtccagtaattcaccgtttccactccgggaatagggggaataaaggtttccgaaccggtgcaaagtatcaggttctcgccttcgtaagtctcctcaccgcagcggactgtattcttatctatgatttgcgcttctcccgatactatcgcgacattgttcgaagccaacttcgccttcactcccaataccagtttacgcaccactttgctcttacggacaataatcttggataaatcaaaagagacttcggatacgtttatcgcatacttcgacgcgtgctttgcactatcataagtttttgccgaatagagcagggtcttagtcgggatgcatccctcgttcagacagacaccgcccagattgttcttttcaatcaataatacactcaaaccggctttgccggcagattcggcagccgtatatcccgcaggaccaccgccgataataatcacttggtatttcataataaataaattatttagttcattttcttttcaatcagttcaacaaattcccgttctttgacaggcatgacggaagcaaacttgtctttcccatactctatcaatatgtaatcggtcaccgagaaactcccgaatttcatagaacggtacctttgtatagtcgtaatttcggaaataggaattaccttcttacggataaagcgtccacgggatatttcaatatttccgttcgtagtgactgtataggcggtatgtataatctgttcgatcactacaatcagcatgagcataaacagcacagccggcaagatatatttacaccacaaagcaccgacggcatttacagtaagcactgccaagaggaaatactggtaccaggcgatgcgggcatgaaaaattcgattcattttgtcagatttttgcctgcaaggtagcaattttatgaattagtgacaacgaaaagtacaacgaagtaacttattttgtagctttgcggtgagaaataacaaaattatggtaagaaaattcgatttcctcgttatcggctccggaattgccggtatgagttttgcgctgaaagtggcgcacaaaggtaaagttgctcttatctgtaaaagtgggctggaagaggccaatacgtacttcgcacaaggtggggtagcgtctgtgaccaacctgctggtagacaatttcgacaaacacattgaagacaccatgaacgccggcgactggatcagcgaccgtgccgcagtggagaaagtagtgcgcgaagctcccgcacaaattgaggaactaatcaagtggggagtggacttcgacaaaaatgagaaaggcgaatttgacctgcaccgcgaagggggacactctgaattccgtatccttcaccacaaagacaatacgggagctgaaatacaggatagcctgatcaaagccgtgcaacggcatcccaatatcacggtaatcgagaaccagtttgctattgaaatcctgacccaacatcatctgggagtcaccgttacccgccagacaccggacatcaaatgctacggtgcttatatcctcgatccgaagaccggaaaagtagatacctatcttgccaaagtgactttgatggccaccggtggagtaggagccatctacaagaccacaaccaatccgctagtcgccacgggagacggcatcgctatggtttaccgcgccaaaggtacggtgaaagatatggaatttgtacagttccaccccaccgccctttatcatccgggtgaccgtccttctttcctgattacggaagcaatgcgcggctacggtggcgtactccgtactatggacggcaaggaattcatgcagaaatacgacccgcgtctctcgcttgccccgcgcgacatcgtggcacgtgccattgacaacgagatgaagaatcgcggagacgatcatgtttatttggacgtcacccacaaagatccggaagaaacaaagaaacatttccccaatatctacgagaaatgcctgagtctgggcatcgacatcactaaagattatatcccggtagctccggccgcccattatctctgcggcggtatcctggtagacctgaacggacagtcttctatcgagcgtctatacgcagtaggagagtgttcttgcacaggactgcacggcggtaaccgcctggcttccaactctttgattgaagccgtggtatatgccgatgcagctgccaagcacagtctgcaagtcatcgaccaatattcctacaacgagaacatccccgaatggaacgatgaaggtacccgctcaccggaagaaatggtactcatcacacagagcatgaaggaagtgaatcagattatgagtacgtatgtaggtattgtccgcagcgaccttcgcttgaaacgtgcctgggacagactggacattatctacgaagagactgaaagcctgttcaaacgtagtgtcgcttccagagaaatctgtgaattgcgcaatatggtgaatgtcggctatctgattatgcgccaggcaatggaacgcaaggaaagccgcggattgcattacacgatagattatccgcacgcaaagaaataattatgaaaacattagctcaactctttatttctttgttctgtatgataggattagcttcctgttatacaggcatcccgctaaaaagtgggaaatccgagaacaacagaacctacgaagtaagttatctgtttgagcacgagggaataaaagtctaccgtttttttgatatgggaaactatgtatatttcaccacacggggagatgtaactagtatcaagaatgattcgacaggagaacggacaattaccatttacaaagacagtatccgaaataaatagaaaatgaggctgattaacaagtcagcctcatttttctttatccaattaatccggtagacgcggattaatagttttctttcttcacttcgaaatatgcttgcggatgcaggcaagccggacaaacttcaggagcttccttacctacggtgatgtaaccgcagttacggcattgccataccacttcgccttctttagcgaatacagtcatattttcgatattgttcacgaaagccagatatctttcttcgtgacctttttcagcgatagagatgttgcggtacatagcagcaatcatcgggaaaccttcctgttctgctacatctgcgaagtgaggataatccagtgaccattcttcatgctcgccggcagcggcagcgcgaagattttcgagtgtagtaccgattacaccggccggatagctggcagtaatttcaaccataccaccttccagaaacttaaacatacgttttgcatgttctttttcctgatcagccgtttcagtgaagatagcagaaatctgttcgtaaccttcctttttagccacacttgcgaaataagtgtaacgcattcttgcttgtgattctcctgcaaatgaagtcaacagattcttctctgtctgagttcctttaatacttttagccataattctaatctatattttaaattggtaattaccaaacgtaacttgtcgtactatttataacgcaaatataagcgaattgttcgtaataaaccgacttttctttatgaataaaaactatcagttcattgatgaaatctatcaacagacaaataatatgctggagaacatacttatttcgattattttatataattttgcaacctctactttgcaaaaaggtcagattacacgtataacaactcataaaaatgaagctatttgaatttaaacccaagctggtttcttgtctgaagaattactcgaaagaaacgtttatggcggacctaatggccggcatcatcgtaggtatcgtggcacttccattggctatcgccttcggtatcgcctcgggagtatcgcccgaaaaaggtattatcaccgctatcatcgccggatttatcatctccctaatgggaggtagcaaagtccagatcggcggcccgacaggtgctttcatcgttatcatctacggcattatccagcaatacggtgaagccggactgattgtagccacgctcatggcaggtgtactgcttgtattactgggagtcttcaaactcggtgcagtcatcaagtttatcccttatcctatcattgtcggatttaccagcggtatcgccgttactattttcactacccagattgccgatattttcggtttatcttttggagaggagaaagtgccgggagatttcgtcgggaagtggatgatttatttccgtcacttcgatacggtcaactggtggaacactatcgtgagcgttgtcagcattattatcatcgccattacccccaagttctcaaaaaaaattcccggctcactgatagcaattgtcgttgtcactgctgccgtctatctgatgaaaaccttcggaggaatcgactgcatccagacgataggagaccgtttcactatcaaatcggaattacctgacgctgtcgtgcccgccctagactgggaagctatcagggaattatttccggtagctatcacgattgccgtattgggagctatcgaatcattgctgtccgccacggtagccgacggtgtgattggcgaccgccacgattccaacacagagcttatcgcgcaaggcgcggcaaatatcgtagcccctctgttcggaggtatccccgctaccggagctatcgcccgtaccatgacgaacatcaacaacggtggcaagacaccgatagccggaattattcatgcagtaatcctgctcctgattctgcttttcctgatgccgctggcacaatacatccccatggcatgccttgccggcgtgttagtcattgtatcttataacatgagcggctggcgcgtattcaaggctttactgaaaaacccgaaatcagacgtcactgtgttgcttatcactttcttccttacggtcattttcgatttgaccgttgctatcgaagtaggattaattattgcctgcgttctctttatgaaacgcgtaatggagacaaccgaaatctctgtcatcaccgacgagattgacccgaacaaagaatcggacattgccgtgcacgaagagaacctcatcatcccgaaaggcgtagaggtatatgagatcaacggcccttatttcttcggtatcgctacaaagtttgaagacaccatggcacaactgggagatcgcccgaaagtacgtatcatccgtatgagaaaagttccgttcattgactccacaggcatacacaacctgaccgtgctttgtgaaatgtcgcagaaagaaaaaacaactgttatcctttccggagtaaatgataaggtacataaagtgctggagaaatccggcttctatgaactgctgggaaaagaaaacatctgcccgaacataaatatagcgttggaaagagcggaaagcattgtaaaatagcgatgtttatcaactaattacaggagatatataccgtgtatatcgggcatatagatccaatgcgttgggtatatatggcctacgtgccggatctatatgtccagcacacacggcatacaagctacttaaatcaaacattatttcaccagactttcaagaataatccgcgcttatacatcgctctcaacagtactggatcaataaatggtacgatcgttagaaaaacgataagattatgccttatcacaattcaggattgaatacatcttcatatccacaacgacgccattcttcaccgcattctttctcagcgttccctccaactgaaagccgcttttctcaaggatacgacaagagccgatattatgtgcgaaaggctccgcaaagagccggatgatatcggtattgcgaaagatatactcacatatctgtctgatggcactcgttccaagtccttttccccaatagggttctgcaatataataacctacttcagccgttttcgaatgtatattgctctgacggaacgcggctatacttcctattgccttgtcatctacagtaatggcaaatgaaaaagtagtttccggatcggcaacattcatcgcttgtatgaactctttcgcatcctccgccgtataggggaaaggaatgccgtctctcaaattatcaagcactttcttgttattcagcgtctctgcaatgtcattggcatcttctatccgccaccgacgtattctacattccatacaatctttactatttgaggttacactccttgctaatacgtccgtaaaactacgaaataaatcctagactgatataaagagccgattctattttttctaaaaaaacagagcaaacagtagagtcggatttttatttccagtctctactatttgctcccctaaccattttacaagaaaaaatagattgaatgattcaggaatgctgcttctatcactagaattgatgcattctcagttccttatcaaccaatattccgtctttcaaagtcaattcaaacttcactttacgtttcgctttcagcttcaggacaaacaattcttccgaaccattcaatgcttcctgctttcctatattgacaaacgtaggatagagcgatttcactccattggtatgcaagcggtcgtaagtcaggttttccattgctttcatattcagcggctctacaccaacgaactcaaagtcattctgatcgtaaggcaatgcaaagctaagtgcattcacagctttcaggtcattacccttcacgcggatttcaacgatttcatccttctgatagaggtgtttcggggtgctgattgataaagagcccgatactttaagcgtatcttttctaccgacaccaccttcgagctgagtagctaccacgctgatatcgtaagcgtctatcagatcattcatgtttatatcccctttgctgatatatccttcataatcagaatctccacggcgcaagcccgtgtaattcatataagaagtcaagtcgttgcggtcgatcttaccgtcattgttgatatctccctgcaagtagctggctgttccaggcactttgaatacgtacaattcgcggccggaaccgtaatttcctacaccttccgtaacggcaagtttgatatagcgtgcagtaggacgggactcgaagctgaatatcttcacatcaccgttgcgtttccaatcgaatgcacccgcctctgtccaatgttccttatccatgctataatataccgtacctttcaataatgtaccgttaccggcatcagtacgcggcaagtagtggaacttatccagttggttcaccgtcttgaggtcgataatcagatcaagcggcattgcattcacacggtacttcgtatgccagttgtctcccgattcggcaaagtcgaacaaacggttcactccgaatcctccctgagaagcggcagttgattcaccttcaattccgtgaatagcaaattccaacggattggccttcgtcgttacctgaatagttgcccagtcggaaacgccgtctttattgacagcacgtactttgaaagagtacggagtttctgcattcagcccttcaaacaataaataagtattgcggatagtcgtataaagcataccgtcgaattcgatttcatagaaatctgcattagcgaccttatcccatgtcggtttcaaggtgtatgcttcgcggttttcttcggtcacttgtgcattctgcggcatggtcaaagtaccggtagttacacggtaacgatcggcaggcgcaaaacggaaaccgtctacgttcagcacaacctgactgaccgtaatgtcgacagaagccagtttaacgcgtagttgcggattctttgtaatgaccactttctcaaattcactgcctttagtagcgaatttattcaggttgggagtagcttcataccagtagacgttctcgcctttcaggaaatcttcggccgtagttacttccataagtttcaccgttttcttgttcaccttagcgacaagtttcttcggtttttcggtaacattgatacacaattccgtctttttatccttcacaaaaccgtcaaagtttccggctgtcggatgaatggtgatagtaagacggttcttcttgtcgtttacgtccgattcaatcagggtagatactgatttattccggcggtaagcttccgttacaccgtcatcatcatactctatggtttcagtgtgcccgttcgggtagaactcataaatacgcagagacttgtctatctcgctaacgttattatgagggttggtcatcggaatgatagagccattcttcacaaatacgggaagtttccagataggagtatcgaagttgttgagaatacagttaccttcgtacttctcgccactgaaataatcaatccaggagccggcgggcagataaataccgtcgcggatatcattgcctttctcatcagcctgggttttctgataaacgggagctacaaggaaatccgtaccatacatatactggtactgggtagccgttccatgcgtataagcactgggataatccaggaacatcgcacggataagaggcattccgtctaccgcctctttggcaaaactatatgtgtaaggcatcaattcggatttcaacttcaagaacatccggtttatggatgtggccggttcgcctaaagcatgggggtacttctcattggcgccccagccgtccatattcaattgcatcggactaaatgttttccattgaaaatcacgtatattgactgtttcattcttgccaccgaagattccgtccatgtccgaacaaatgttcggttgaccggaaaggccggagcctatataagtagggatatggaaacgaatatattcccacacaccgcctgtctggtcgcccgaccaaattccggcataacgttgtgtgcctgcccaaccgtccaaagagataatgaaaggacgtgcatcatttccatagtaaggcataatacggcctacgtcagccacaccgttcaacccgaaggagtatccggcacctacccacgctacgtctgttttcagtacacgcacgcctgcatcacgaacctctttcacaatatcacgttgcagcaaagcacttacgccttccttcggatgcaagtctgactgtgtccaaagtccgatctccactccgttttgacgggcataatctcccagacttttcaagttggcaatgttaccgtccagcgtttcggtctgtccgtatcctgcaccgtaaccgtcgttgggaagcagccagccgaggggcatgtcatggctcttatagcggtcgatcactgcacgagcggagaactgatagttgttcttttcaccgttcagggattctttgataccaccattgtctttctgactttctttgtagcgttttccatcttcaaaaagaattcctttttcatcttctttccaatagtcacggttgtaggcattcaaatgtccttcgtaaaaaccaaatttggggagtaaaacaggatttcccgtcagttgatagaagtcgttcagcaacgcaacggctccatcgttaaccatataaaaaatatcaaggtaggaagaattgtgagatagtttcacaacatttttttccgttgcgccaaagtcatactcaccttttttaaatgtataccacatcattccgtagccgtttgtcgaccaatagaaaggggtaggggatgctacgccgccgtcggtccagctattctgattctcgatagcaatgactttgcctttatgagagaagcgtccgttctgtacaccgccaccgtagaagtactcatccggctgctctttcaaagtaacagttactttcttcggttcgaataccacaggagcagtttcatcaatgacacaggcatttgttcccagattgatgaccttcatcagccctgtctgtttattcagttcgacccggacttttccggtagccaatgttataatgccgtccttttcatctattgccagattggatacttgacgacgaggctggtctacaagtatctgtgcctcaggttttgcttccgggtcacggatgattcctcccgaattatcctgaaatacacggaagatattctctccgtaaaaatcaattgtcctccgctgattattggagaataacacatcgactgttgtcggatttactttcttcacactaagaatacccgaggtctgttgagccgtgttcgaaacgacattactcatatcggacttttcagatgcttgtatggaaagaagtgaaatcggataaaagagtaaaaacactgcgataaatctaagttttcgcaaacagaaagagtggtttttaatcatgttttacttatttagaattagacataagactgctttttatttctatctcaacttttgtttttccaatacttccgctttatttacggaaatatttcgctaatgtataataaatacacaccagttcattgtacccctattcaaaaaggcgtttttttaaatattctttgttcttattactttttttcactatttgcccaacttaaacaaagaaaacaatggtatacaaaaaaggaaccgacttagagaaaaacataaagattcagcttatttatcttttatcaaagcatacttatattcaacgattaaaatctagtttttttacccgtactcagcttcagcgcttcaaactcatcagtaagctcttttacctttttcggatatttatcagccaagttatgcttctgcccgatatcttcttttaaattataaagttgatattccgtctgtttacgataaggaggtattaacgcccaatctccttttcgataggcataattgaacataccttcaattaccaattcttcccgaccctttttacttttacccagaaaagccttcaaggtgttccgactatcaagtttatccggataagtttgtcccaacagtccggcaaatgaagccaacagatccatctgacaaacaaaagcgtcggatactcctggttttaccatagcgggccagcgcaacataaacggcacacgtactcctccgtcatacatcgtcgtcttccaaccgcgaagagggcctgccggacggtgcttaccaaccaactctactgcctggtccttatatccatcatccaacacaggaccgttatcgctcgtcaatattacaatcgtattttctgccagtcccaaccggtccagttctttcaaaaactcatcaacacaccaatcagcttcgagaataacatctccgcgaggccccatacccgacttgccaataaaacgttcattaggtactctaggcacatgcggctgatgcaggccataataaagaaaaaaaggacgctctttattatctacgacaaattgcttcgctttttgaagaaataactgtgccatatcctcatcccgccattgtgctgcctttccccctttttggaaaccaatacggggcactccattcactatcgaaccggcatgcccgacactgggatgcattcttaataattccggattatctttccccgtaggctctccaggaaaatttttccgatagtcaacataaagcgggtcttccgcctcaagccctatcactttattattctctaaaaaaacgcaaggcacccgatcattcgtagctgcctgaataaacgaataatcatatccaatctcagaagctcccggatatactcttttattccagtccacattaccatcccccagtccgatatgccattttcctacggaaccggttatgtatccggcctgtttcattaccttaggcaaagtaattgcctctgtatcaataatcaactttgcattccccggcaatatctttgcatccggatttgtccagggatacctgcctgtcattaccgaataacgactgggggtagaagtagccgccgtacaaaatccttgagtaaaacgaataccctcattagcaatacggtccataccgggagtttgtattgcatcagccccatagcaactcaaatctccgtaacccagatcgtcagcaacaataagtactacattggggtgttgtttatctatagatttcttctccggttgaaactgtccggccaacagggtaacaggcatcgaagaaatgcctgcgaacgcataaaaagtcaaattcaagtttttcatatttatttatgtagttatttaaatgttttcaagttgtttttcagtctctacaagacctccggatatttctcatttactattttttcctctttgtagtcattaaaataatctccgacaacattgagatatgcctcttgcttctcttttcttctctgccacacccggcaaagctactaacaaaagagcaacacatacaaatgatgttcttttaatattatagcttcttttcatgcattcctcaaattaaagccttcacaaaccaattctttctaatgttatttcttcacccgcccgtgtttttaactcaagaactccattcttttcagtaatcttcttctttttcccagcaatcctgaattttcctttaaaaggattgaccaaacgcaacaagcctcctttctcagaaacaactttaaccaaagaaacatctccgttttctaaactggcacttacaacaaaggctcctatggcacgtagcttatcaaacgaaacatctttccaatcggacggaatagcaggaaaaacacggataactccactgtgactttgtaataacatctcctgaactccggaggcaaaagccatatttccttctaatgtaaatggacgataagtaaatccggacttaccacttctactttgatctccatttgcatgaaaaccatttcttaaacaaaaacactccgcaaatatacgtaaggccttagcagctccgttgccatcaaaagcccgtgcctttaaatttgccaaccaactatacgaatacccggtccaaccgccaggcccgtatttatctaatgtattcaaactagcatcaataatttgagaatcgctttttccataagatttatcaagcaatcctaacggatgaattgctaataaatgagaaaaatgtctatgagaatgttcgtatggataccctacagcaatagacaatcccccttgagcatcaagaataaaatcaggtaattcttcctccagtttctcccaatgatcagcttcatctttccgccctaattccctagccaattcagctgctgcacgaaaagcaaaacgaaccaatgcacggtcaaaattcgtcatctctctaaaccaagcatccatactattatctttaaattccggagatgaacttaaaggtaaacttcttatcccatctttcactatagtaaactgctccaaataagtagcaacttctttcaaatagggataacacctgtctattaaaaattgacggtcctgtgaatatttccagtataaataaaaatgctgggaaagccatgcggaaacagttgggcctaatgaatattgacaccatcctcccatcggttgtcccagtaaagtacaaactcccggaacattcaacccctcagttccaaaataggttttcgtatatctcttattttccttcagttgattccacaaagtatgtaaatatccgtaactttcttccagataattgccagtataaaaaggccagtaactcaattgtgtattcaaatcgtgatgataatcacctttccaaggaggtaattgcccattgtcagctgtccacacagactgtaaagatatcggatacgagtcttttctagagatactccccattttataaatttcattgtaatattgcttttctatcaccttgtccggcaatgtgacagacgaacggctataaaatatattccaccaattttggtgagtctgataataagcctctattccggcattcatagcctcatccacaatttgtgatgcttcttcttttacaagagaagaggtaacactccatacacctattattttttctccaaaccgcttccattttactgcaaccgaataagaaaaatccccccaaccaggttgattataaacaaatttatcggataatgcccgttcaacttttccttgttcatatccgagtcggaacagactatgttgactatgatcttcagcggtatgtcttacttcttcactataagaaggaggaattaataatggctcaaaatcagcttctaccccttcaaatataaaccaacccacaggtttttgggcatggacaaaacagcgtaaggatactcctgatttccatacaacttcacatacaacttgtcgttgatataaatgcactttttcaacctctccaaaatgttctattggaaactccaaacccgcacccggaatttttgaagggccgggataagcgttatatggattatcaaaccgcctctgtaccggtgtataatctcctttttgaagctgttcgtacaaccaatgaaaagagaagccttctccttctaattctttagaatgccgcaagtcccacaaatcactgcgatctatggacatacgcaaacgttctcctttttgccagattaaagaaccaatagtagcatttcctagcggtattgcttcatcccattttcttgccaagtctcgaaattccatatcatgcacatgagtagaaacagttactaccgaagcatatgaatcaatagccaatagaaacaatatagcaaacaacaactttcgataactcattatttttcacttacttaaaattagaggtaaacaaaagagaatcttaaaaataaacaaaaggtttcagctcatttccttgtttatcaataggataaagagcgccttctttttccaaccgagatgacatattacgaatcatctccctacatttatcaggaaatacagaagaaagttcttttttctcttcctgatcctctttcagattataaagtaccgctttcggttgcttcggagtctccggcgaataatagtaaatcagcttccaatctccctcgcgatatactgtgaagtaattgccgcgatgagcgtgagggaagtgcataaggaacgtttcaagacgttttctattgacttttccacttagctgcttctttagatcgaatccgtctattacataatcggcaggcagtttacatccggctaccgataaaactgtcggataaatatccatgatcgttcccaattggctttgcatacctccgacttcaataggtaatcgcttctgaaatttattacctttccggggctttgcccaactcacaataaaaggcacacgcataccaccttcaaactccgtacccttttttcctctcaatggcgcggaagaaccatatccccgttcttctcctaaaggtgcgtctccaccgttatctcctaaaaagaaaatcaaagtgttttccgcaattcccaatttttcaagttggtccatgatgtcccccaaagacttatccatgccttctatcaatgtagcaaaggccttggcctgttccttcttatttgggtctgtataacgggacagaaaacgtttgtcggtctggaaaggtgcatggacagcataatgagccatattcaaataaaaaggacgcttttcttccacagctttagctatctcacggttagcctctatcgtcagggcttcgctcaggaaagtatccgtaccatgatatttctccagatcgggtactgctctggctttcgaacctttaatatgaccgtatccccactcaccataataactgccgggatgtcctattcccgatcccgcaatgttgacatcaaaaccaagattcaacggattttcaccctcgctatccatacagccgaagtgagcttttcctatatgaatcgtcttatatccagcctgttgcagaactttcggcatggtcggaatatccttcgtcagccctttccaattccaatcaggaggcccgaaaggagtacggttattactttccgcattaatccagttcgtagtgcgatgtcttgttgcgttttgccccgtcaacaatgaggctctggaaggggaactcacactttgcgcataaaaagtagaaaagcagaccccttgttcggccatcctctccatgttgggagtatgataccaattatttaaagaatgcctcacccgatttccgctcccgtctgtcagaaaaggaacggaagtatccataagtcccatatcatctaccagaaaaacaataatattaggacgttcctgataacctgctaccgttcccgaggctgctactaaaagatttaataaaaacataattacattcaatgattaaaattcggttctctacctacaccttgccatatccctaaacatccgaatatcctatcttacttagtattcgctttttcccgttccaatatggctttcatagctttcaccttctccggatatttttcagccagattttctttctcacctctgtcctttttcagattgtatagttgatctaccggagcattaccagtctcagtccttgtcagtttcataaaagctgcccctttattcggagtaatatatttccaggctccgtctgaaacagacaaagaaccagaagcttcgatcacataatcacgtcccttacgatcagttcccaaaaaggctttcaactgattctgactgtctactccggcacccgactgcatctcttgtcccaccaattcagccattgaagcaaataaatcaatctgagacaccaaagcatccgaagttttaccttttttcaccttatcaggccagctgacaataaacggaacgcgagtacctgcttcaaaattactatatttacctccacgcaggtttccccaaggacgatggtcgcccaacagttctaccgcctgatcctgatagccatcatccaccaccggaccattatcactactcaatacaattaaagtattttcccgcaatccctgtttctctaatgcctccagaatcttacctaccgtataatcaaactgaagaatggcatctccccgataccccattccgcttttgcctacaaaacaaggatgcggaaaacgagggacatgcacatcattggttcctacatacaggaagaaaggtttatcactatttctttcgataaaacctaccgttttcgcaattatcgtatcagcaatgtcttcatccttccaaagtgctttacctcctcccttcatatatccgatacgggaaattccattaacgatagcctgattatgaccatgattcggagacggtttcaaatttgtcaataactccggattattctttccggtaggttcgccgggaaaaggctttgtataacttacttcaataggagccgatggatcataattaagcacctgttgattttccatccatacacaaggcacgcggtcaccggtagcagccattaggcaagagtagtcaaatcccaaatcttccggccccggactaactttcttgttccaatcctgcgtacccgttttatcccccaagcctaaatgccacttcccgatagctccggtcgtatatccggcagacttaaacatatctgcaatcgtagtttgctccggtcggataaccatacctgcatcaccacgggcaattcccgtatcatttctacgccaggcataatgtccggtgaataaagaataacgtgacggtgtactcgttgaagctaccgcatgcgcatccgtaaaacgaataccactactggctaatgtatctacatgaggagtctgaacgcgatgggcaccataacaactcatatctccatagcctaaatcatcagcaataataaagattacgttaggttgtttttcttttgctttcttctgtgcctgaatcggcgctgcgatcaacaaagagccgctgatactcatccataaatcaaagttcttcataatataattgttattgggttattgttttttcgcctttatatatgcaggattcagttctgtcggaatatctgcacgggtatctataagccatttcatcagtctagtatacagttcttttgcgagagtcggttgcaaattaactaaattattcctttccattctatcatttttcaaattaaaaagctccattgacttatcttcataataataaatcagtttccagtctcccgaacggatgatggaatatggagttgctctaaaatctttaccaagcccctgatagccttccaaataagcaggaaaatgccagaaaagcgctctttgaactttcgatgtacctttcttcatccgaccaaaaatattctcgccatcaagcccgttatccggtattccaccagtcaatgctactaaagtaggatagaaatcaactcctgttacaggttctgaaactactgttcccgcttttatcttacgagggtatttcattataagcggaactctgattcctccttcataaggcattcctttggctcctctaagccggaaattattggttgctgccgcagcacctccattatcagaataaaagacaataagcgtattttccgagagtcctaatgagtcaatagcatgacataacctgcctacattccaatccagattttctaccatagccgcataaattgcattcgtctgatacttccccttagtctttttctgatatttatcgaccaaagtctggggagcctttaaaggcgtatgaaccgcatgatgcgccatatagaggaaaaaaggcttgtcttttgtctgttctacaaatttaatagcttcacttgtcaaacgatctgtcaggtactctccctcactcccctcatccaatcccaaatggcacttttgctttctacaataagggtaaaaataagagtaaggtgaaccagccctgtcgccggctatattataatcaaatccctgtgataggggaccggttttactgccatcaagatcactacccaaatgccatttcccgatatgcccgcacacatatccctgctgttttaatgcctctcccaaagtaacaaggtctgtccgcacatcctccgtatttgtaataggaatcaatttacgcttggttttatctcctctcgctgaaggactcacagtatatactccgtgtctcggagtatagagacctgtcataaaacaggcacggctcggtgccgaattggctgccgctgcataagcattatcaaagaaaaccccttcagaagccagtttatcaatattaggcgtctcataataatcacttccggttatgccaagatcattccaacccaaatcgtcagccatgataaatacaatattgggacgttcgttctgtgcatgtaaggctgatacaaacatacacccaccagccaatatcggaaaatataaatgtctcatccgtctcttttttttatggatacttaataagttatctattttttcttatataaatcctgagctgttttaatctcattatgcatcaactgctgatgatacctattggttatttttcgccagccttcttccagccatgagggttcaatacactcatttttctcccatttagccaattttttcgccagtttacgatacaaatccggctctttgtttatcaaattattcatctcttcaggatctcttcggatattatacaatacagaatcaaccccatgagtgatgattaatttataatctcccgaacgaatagcacgtgtatccattttacgccagtataacactttatggggttccccttttttacctttcaggtaaggtagtaatgatacaccgtccaatctattacgtgttttcgatatactggccgcatcaatagctgtcgcaaaaatatccaaagaagaaaccaaaccatcataaggcttgccagcaggaattccattcttccatactacaaaataaggcacacgatgtccaccttcaaatttatttcctttgaaacccttcaaaggataatttgaagactgattggtagtggctcctccgttatcacttaagaaaaaaatcaatgtattatcaaatttcccactatctttcagtccacgaattacagtgcctacgcccctgtcgagtgcataggtcattgcagctagtttttgtctcggatgcccttcaaacttagccatatcttcatcggttgcttgcattggagtatgcaccgcattataagccaaatacatcatgaaaggctgagaactttcatttataaactcaaccgctttttcactgaaagcatcagtcaaatacttctcaaatttcacttgcctgtcattcaataacaggttacgttcatcaccgggacggtcactctttttttcattataaaaataatcacgtccccccgctttcataccgtaaaacaaatcaaatccacgattattaggatgttgttcatccctacttcccaaatgccacttaccaatagcagcagtacgatatccattcgttttaaatacttccgcaatcgtttcttcttccaaaggaaggccattagtacggtccgataagttacattcatagccgaaccgatgtccataacgccctgtgataagacaagctcttgagggactgcttactgtcgcagccacatgagcatcggtaaatacgactccctcactggttaaagcatcaatattaggagtttgcatctcttttgatcccataaatccgaagtcattataacccgcatcatcaatcaagatcaccaatatattcggatttttatcagttttactttctaccgccgagacggtctgaatgtcaccggaaactaacaatccgggaagacatatatactttaatatattcatacttttctttacatataaatttatcttgtaccacaaaccaaagttcttttaccatcccaagagacagcttcaatacgagtagcccctttgggataacgaataaatgtacttgaattatctatagttcctgtaccgacaatacaaacttcaactaactcattaccagcatacgtttcaaatgctacgacatttttccacaccgaatgagaaactgttttcgaaagattaccattagataccccttgattaaaaactccttgtacagaaagttgttttttatatgtatccagactatttccagatatataataaataacaggagtaggtaccggagatttactcttaccatagttttctatctcccctaccatttctttcgttatcgttatttgctttgccggcccataatccccgactttcatattaatctcccgcagtaatcccatctttttaaagaaatcggtcaaattcatctctgatgcatccatcgcacgtttcatgaaatttacatatttttcgccataagtatataccgaattattatcgtgaatagctgcccaatgtacatctggccagaaatcaggtttagaccacggagcatcttctgttaacataaaaaagagagataattgccaaagaggagccaatgaaacaaacggatcagcactataatattcacctttttcagggtcattaacaagtccgccttcatgtgtcaaatacggttttttcttcacaattgcatcattcaaataggcattaaaacgatcggcaactactttatcattataaccttgccttttaaattcagtatgctccaaacgacaagcagcattattcatctgatacatggcttgttgcgcataaatattgtttgttacttccgcccaaccggctcctttcatttgagccacttgattgccatgaccaaattcatgcccgaatacccagatattctgaagaaaaactcctttatcaagcatagcttgttcactattgggaaaattagcacaagtgccattccaattaggggatcctccccatgaacgcacacccaacatacgatttcggggaactgcattgtttttaactaatcccatcatcatatactctatctgcattagttcatcatgcatattcattatactcataatatcatccggacaataagtattaaatgcattaactgtatttatcaattgaacacgttcacctaaaacatccagcatagcattagttacattcaaacgttggacacatatattcgctaaattaagaatacgtttccaatcttcattggtatgtccggcacgtacatcccaaaatcctatttcattaccgtaacatacatgtacttttacggcaggttcatatacttccatatctgtccaatactgtatataccctgtaccgtctactgtcgttattattgtatttaaaccactttttaatctaatagtctgattttcgcctccttcacgccaatccttgatatataagtttagggtcttatcacctatctcgtctcctacaaatataatatacttcttatccttttcaaaaaataatcctgtcggattatcgcaaatacttcttttaccaattgtcaacccttcaccaactgttaccggatttttacaagactggtaagtccgtacccgaaactcactcggataagtattgtctaaaagttcttgtgcaatggcacgtatcatcggatgagtgattttcacaatgtcagcttgggtagtcgtaggtttcaattgagaaaaaacattgccttcaaaataaacagcatcagccgccagatcaaaatcagtaccttctgctttctgataacattcaaactctgccagagcaacactgccttgatttggttctggtgtacgttcaaatgtaagacgaaaatgagtaggttttaccacattcacatccatccgaatagacggcactattattgactcatcaaacgaaccacatttagtccattccgttaccgcagcagacttatatgctatttccccttttgttaattgattatgtactgttattcccgcttttctttgatgtaaaataacataatcaactttttctgtcccttcctgcagtgtatactcaaatatgataggttcccgttttgcacttgtgcccgatccataatgagtattcagatcaccatcaatagtcttttccggtcccgactttccatcaccataaacagtaccttgaatcatcccaacactttcaacctttaccttaatatcatccggaataacatcatcaacgtttgcagcttcctgttctactgcaacctctatcacaacaggttcatcactttgctcaaccgaatttattcgaattatatctctacgtggagataaaccaatattagcagtcacactatattgatattccgactccaccattcctctcgtatccggtccttctttcaatgtcagccatttttcttcattctgaagggtatattctacattagctgtcactttcatagtaaatgtttgtgcctcctttgataaaagttttgattcaatgtttaccaatatttccggttctgaacctaactgtaccactcgaaaaggtatactttcaactcctgtaccacgtagaacgaactcagcctcacgcctgcccacttcttcattaggagcgacattaaatgtcagtaaatgaatatctgaagccgataaaccaatagaagttttacaccaatcgtatccacttgaaattttaggaaccaattcccaatcagacaaattggtatgtatttttatagttcccgtttttccttcaataggtacattgaatacattattttcgagctcaacagtcaaataaggatcaatctgattttcttccgtatcactacatgcaaataaaaaaaagagaaatggtaagaataaataagaataaatatgtttcatgattagattcgttatgagtatttaaaagagctataatgtaaaaacatccttccgtctaccgtcccaagaaacagccactaaccggtcgcatccattcggaaaatatgcgattgtctcagtattgtcctcagttcccgtacctaccatagaaacacgctgcaatttacttccctgataggcttcaaaaaccactacattcttccatatatcatgagaaatataacaagattcaccctccacacgaatcccctttccttttataccctgtacaggtaactgttcacggaaagctttgacactattcattgttatataatgtataaccggagatttaggttttggatatcgagaagcataacggataacttcctctacttgcttttgagaaatacttaaatgccggttacctccataatcaccaatttcagtatctacagaccggagcataccgcatcttatgaaaaagtctgttaaatcttcctgtattacatcgcaggcattcttaacaaagttcaattgaagttcacctactgtcagatcctgttcatttgtccgacgtacaatctcacttatacgcgcatagaaatccggttttcccttaattccgcaacactattacaaatataactttttaagtacctgagcaacaaaaagttgctcaggaatttgccatgtcagatttttcacctatcttagtgttgcaaatcaaaatatgtatcaaacccgacagacatggcaaaggtagcaattaaatccgagaaactcactccttttggaggaatattttcaataatggagcaatttgactccagactctcatctgtaatcgactcaaccctcggtatgagatgcaggctgtatggttatcaatacagcgaaatcatccgttcgcttatgagcgtttatttttgtggcggctcatgcatcgaggatgtcaccactcatctgatgtaccacctttcgcttcatccgacacttcgcacatgcagtgccgacacgattcttagagccataaaggaactgacccaggataacatttcctacacatccgacactggcaagacctacgacttcaacacggcagacaagctgaatacactgctcctcaattgcctattgtccacagggcagctgaaagagggcgaggggtatgacgttgacttcgaccaccagttcatagaggctgagaagtttgatgcgaagcctacatacaagaagttccttggttatcgccctggcgtggcggttattggcaacttgattgtcggcattgagaacagcgacggcaacacaaatgtccgtttccaccagaaggacacgctgaagaggttctttgaaaggtttgaacaaaacaagcttattatcaaccgtttcagagctgattgcggctcgtgttctgaagagatagtggaagagattgctaaacactgcaagaccttctatatccgtgctaaccgatgcagttcgctctacaatgacatctttgccctcagaggttggaagaaagtggaattgggcggcattgagtttgagctggcctccattctcatcgagaaatggaaagggaaggcataccgtcttgtgattcaaagacagaagcggatagacggcgaactcgacctgtgggaaggagaatacacctaccgctgcatccttacaaatgactacgagtcttccgagaaagagattgtcgaattctataacctccgtggagggaaggaacgcatcttcgatgatatgaataacggattcggctggaacaggcttccaaaatcctttatgggagaaaacacggtgtttcttctgcttatggcactcatacgcaacttctataaattcatcatggcgaggcttgacgtgaagaggttcggactcaaagcaacaagccgcatcaagacgtttgtctttaagttcatctctgtgccagccaaatgggtcaggacatcaaggaagtatgtgctgaatatctattcatgcaacaatgcttatgccaatgtgttccagaatgactttggataacaccgacaacttatagtcgtgattttgcgtattgcctcaagtcgcatggtggggtaaggggcatttatatgtctttatggtgacattcgatgcactgtgccccctttttactaacgatgcagattcttttcgcttctgtatcatattaggcgcgtagttgcggatttgaggttttccaaaatttgtaagtgcattataaatttgtagttgccaaaacggacaaagacgtacaaaaggatttttattatctgaatagggaggcgtaaacgatgttcgagggttatatagcaaaggcttttgctgtacgacacaatgattgaaatgccaattaaacaaaccaccataaactttttgccctgtaccgtcgggagctttggaatgctctatcctaaaggggccttccggacgcagcagatattgtatccatgccgcctgaatattattagtaatttccgttgttccatgccatttcaagcccggacgtacctgattcacatgaccgaattcatgcccgattacccaattggaatttcggatatcttcgggacgaataatagaagaagtacgaggaaaagagactcctttcccatttgcattaggcggacctgcccaactgatacgagcaaacatatggttgttcgtacgataaccgaactgatcaattcccaacatttcctgctgccacagaataattcgatcatacatacgaatcatctccactccgcaatcacttcctttttcacgcagagtttttacatcgaaagtcagatgtacatattttccctgcatatcaatcacttctgctatcgcgctatccaacattcgcttccattcatcattcgtatgttgataggcattaaacaccccattattaattcctgtgtgaaaggtaagtttctgttccggagccttccggcaatcctttacataatagcttacataaaccaatcccttatgaggagcataaaacttattatttcctgtttttaaagtaaatacggtagtcttctctttcttttcaccttcagcaggtttactaaagtcgaccaacaatagattcaattgataaccttgtaaatcaggagctgttacctgtatcgtttcgccttcttcaaaatataatccggtaggattctcaaacggactataacgggatgtcttcagctgttttgccaatgaattgatatcagaataaggaatagcaacaaaattgacaggagtagcttgtacggtaatcccaaaacagacattcaacaaccctaaaataaatatacttttaatagtcatcttgtttaaattataaataaaaagaggcttatatgaacctaagaggtatcaatataagcctccttcaaacaataattatgattaatatcctggattttggacaatatgaggaaccttattggtttctgtcataggaataggcatcaaatattgtgcctgtttaaaagtacgaatattctgtaattcagttggcacaaagaatgtctcatctgtatctccttcaatattcataccccatactttctcacccaaaatgcctgcatctttccaacggcgtaaatcccagaaacgttggttctccaaataaaattctatctgccgttctctgcgtactatctctctaagtccctcagcagtattcgctttctccggatgattcgcctttttccatgcctcatcaatagtaggaatacctgcacgaacacgaattttatcaattaaacctttagcttcttccaagcgtcccgtcgtattctccaaagcatccagttctattaaaatctcagctaaattcaaatacatttctgccatacgaatcaccggataggggtaatgaaccggaccattctgaaacgcaggatgaacgaacttcttattcagatatccggtacctgtgtaattacctgtttgtccatcttcccagccattagcatcattttttctgaatttcactactatagccttttttgcattattcgtattaactacttttccattatatttcatgatctcataatttccattatgaaatgcaatccacgcaaagaaacgcggctctcggtttaaatgtaaattcaaagttcttccatttgattgagcaaaataattatttccatcataatttaccggcatattcacaattttatatctccctgaataatcgaattctttatcctcatcaataggtaaaccattttttgtgtagaacatctcaacagtctgtaatgtcggagccaaaataccccatgaatttttatatccattagatgccttttgttttggagtagactgattctgaagagcatacgtcccttctttacgagtatcaaccatgatcacttctggatttgtgccacctacattatccataaaagtataacgtacagcacgttgagctttattcacgggccccggtttattagccgaaggagtaccagcatcatcatgtcctacttcattatataaacgataaccggcattctccaaatcagcaattgccttacgtgtcaccgtctctgcagttttccacttttctatgtcaaccgtctgagatattagaaaacggccatccaacggacttttaaagcctgcaaagaaatcagagttgccattaaacaaaggagaagcagcatacaaatgtactttcgcacgtaaagcttctgccacatacttcgtaaaacgcccgtaatcatctccatcatgtttctcagctagccctattgtttccgcctcagtaatcttttcatcaataaattgaactacttcatctacactcgaacgctcgggaagttcttcaataggggtaagcggatctatgttctctctcataattaccgaaggaccataggctcggaaagacaaccaatgataataagcaatcaacaaggtagcttctgctttataatactgtaaatcatccggttctatgtcaggtgtaaaatccaccacactcaaaaactgataacattgatgcaaacctgtccaaatattatcataatatccttttgtcaactgtggcgaactcggtgaataataaccacgcggaaaagtaacccattcacttttttcgatcacattaataatctccgctgccgaatatttatcaagcgcttcactcactcgcggatcaggcatttttgaataacaagaatacaaataattctttgctgcctgaggattctgataagtgttttccggtgtattacgctcatccggaacaatatccaaataattacatccagaaaggagtactcctcccattaataatataattgcaaactttttcatagctttttacttaaaggtgaattgaattccaatattaaatactctttgagtaggatatttcataccactaccaccacccatttccgggtcccaatgctcaaaaggtgagaaagtcaaaagattcgaaccgttcaaataagcacggaacatcttgaatgtatagccaatttctgcattcttcaacttaagaaaagcaccattccgcaaccaatatgaagaatttactgtattattagcattggtatcacgagtcaagcgtggataagctgcattcgggttcggattactttcactccaataatcatcagcgataaacttcataacaccacgagtagcatttttcccaaacggatgaaaacccgacattagaatagaagtgcgagctgccccttggaagaaaaatgaaaaatcccaattcttatatttcattgaaggaccgaaaccatatacaatctcaggatcttccggatagcccatataaacacgatcattggtattaataatcccatcacaattgccatttgcatctggttgatccacatatttaatatcgcccggctgaggaatataccccaatgtttgttcggcatgtgaatcaacatcagcctggtcacggaataatccatccgctacataaaccaaatgctgccctctggaatatcctacactggacaaattaggatacaactggaacggaggttcgtcacgctccaaaatcgtattatgcgcataagtaagtgtccccttaaatgataaaaagaaatcttttgttatctgtttattgtaatccaacgctatatcaaatccgacattcttcatcttaccgctattctcatagattttcgtttcaccagttcctatgaaatcaggaagagtatttactttctgcatatagatcttactacgaatctctttaaatacatcaaaattcaaattgacttgatgaaataactgcatatcaaatccgacattcaactttttccctacctcccaagttaaattcggattataataacggttccatacgggaccctgtaaattaacattctgatttactcccgtcgtatatttccatttatcactagataaaacaatatcttccaaataagcataacgctcattgataccatcattaccaaccaagccgtaagaaccacgcaatttgaaatgagatatcacatttgaaatcggttcccagaacttttcttgtgagatgttatatcccaaagctattgaagggaaaaaaccgaaacgattgtttttcgcaaagttctccgaaccattatatccaaaattgacttcagccagataacggtcatcgtaagcataagacagacgtgcggcaattccttgtttccgacgtggtaaagaagataaaagattatccggtttattattgtctaactgatcctgattatataaaagcattgcattgacatcatgtacgccaaactttcttttatagtccaaataggcttgaataaatattctacggtcacctgtggcagctccctccgtatttaaagccgttttttgttcattacccactctacttaatgtatattctcccgtagcttcattgtattgatcaatctcaaattgattataaccagctttacgtgtagtttccgtctttgaccagtttttaaaagaagccaatacatggagttttaatcctttagttaccatttttaaatcctggtctaaacgaatatttgcatttaccgtactggcaaattgctttttataaccgacaacgtactcagctaccggattacggtaaccgttgttataaataccaccactcatacctccccaaagcgtataaatctctttatcattacgagccggatatacaataggaaaatcaacgggagaagcttctcttgacatagaaaatattccatcaacacctgctgaaggccctttccaatcccgtaaacttacatttaatcccaatgatattttggtagtgtttgttgcttttatactcagattattaacaaaatcataacgcatcacattgatattgttattgtatgagaaataatccttactcaatgacttcagattaccagcatcatgcttcaccgatgcactcataaaataggtaaccgcctttttacctccacgaatattaaaattaaaacgctgcgcaaaagcattcttattaaacatttcattataccagtctacattcggataaaccaatggattcaacccttgttccgtagccctgattttagtatcatcatataatccggttgtgatgccacgagttgtcaaggcttcattataaagcttcatatagtcaactcctcctaccatttcgggaacagaagtaagttgggacatagacgtttccaagcggaaattaattatcggctttaaaaggtcctgaccggatttagtagtgacaatcatcacaccatttgctccgcgggttccatacatagccgtagccgtagcatctttcaagatagaaaaactttcaatgacttccggatccaaagcattcaaatcgctcgaactgatttctaccccatccaatacaattaaaacgcctgtagcatcgccgaaggtcgatttaccacgaatccaaaaatcagctccatcagcaccgggctgtccgctacgttgtatagcaatcacaccggccatacgtccggcaaaactggtacttaaactggaagaaggaactttcaattcggcagggcgtacttgctggatagacccaaccattgtttcttttttctgtgtagcaccaaatgctgtaactacaacttcttctagtgacttcgtatcttctttcaactgaacagttatcgaagaacgatctcctactgaaatttcctgagtcacatatcctatataagatatgacaattacggaatttttatcggttacttgtatctgaaataagccatctagatctgtaataacccctgttcccgtattttttaactgaatgctggcaccaataatcggatttccttgttcgtctttcacaagcccctgaagcaaacgttttttctgcgaaacgctttgctctgatacttttttctctttcagaactatctggcgttctttcatttcatatacaatattagcttgctccgagaccttatccaacagttgcttaacagttgcattttttaaactcacactgatttgtgttgactgatttatcacttccggcttaaaaaagaatacatattggctattcttttccacataagaaataacttctttcaaagttacatttttcagcgataccgtaaacgttttggcctgcccataaaccggagatttagcctgcaaagcagcgaccaaaaaacaaaaaacaaatagaaggagatacttgccgtttttcctagctacagaatcctccttagccataaagttaatcatagaattaaatgtttaagaatgttacatcggtaattgtgtattaagcccctttctgcatccgaatgatatttgcggtatcatcaacgaatagggaaaaacataaaaaatcatggtcccatagtgtttctcatttataagttcataaatattagttatttttctcgttcattctattgataagacgaacgagctctttattactcctcaatttatcaggaaaaaatgtgcaaaagatttttttagtgaaattgccctccagccaaaacgatctgacgcaatttagctaccgagcgtcctaccagattcatacacgaatgagaagacatctcaaacatgtctgctagttcatcccacgaaaattcttgaacaaatcgaaaatatatggcatttctttgtttggaagacagttgctgaaaaccctttttcaataattggaccttctttaggtcagaatcatttgtctcaaaaatctgcatcaagcctgtgtcgtcgataggaatatcaacgtactcatccaatggcaagctacggttacgggcagctttggaggaatctaacagagcatttaataaagtacgatatagataagacttcacataagataaggtaggaagagaagaatgacttacgtatattttaacaaacatatcctgcaaacaatctttaattgtttcttcatcaaagttcagacgaagggcatacccaaacaaaggagaataataacgatgatatagttcctcaaaagcaactttatcacctttcagtattcgtgtccatagctcgatatccgtcatgtgtcttttaaatagcttgcaattaatgataaggtttacaaatgtagcttttttctattaattaatatcttcctccacagttttttccgaaaaagtcccgactttctatataagaaaggggactgatttttttaaatttatatagttttcagaccaacgtaactaccaagcgttctttcactttaatgcaagagaactgagtaattacctttttttattttgctcatagattatattaaactcgtaaatagaaggaggagcggtagctcgagtgactttcagtcgaatacttgacgtataataattatatggaaatcgaataactttacagtctcccattggctcatcgctcacatagataggtatccacttacctttttgtataatctcaatttgatagccttggattctatttttccgatagttcgaaaagccatcattcccactgtgagaatcacaatattcaaaaatagttattttattaaacgattttgtcttatccaatgttacagtaagagttgacaatgtatcattcactgcagcagcccaacgagtctgcataccaccatcaatagcatgaccagcagcataatgaggatcgtcacctgatactgatgtcgcttcagcaacctgattcattgaaatacacgtcccatttttaggcagcggttttcctttcttcaaccctaaacgttttcccaactcaatggcagcatttgcctcatattcacgtatgcgaccagactcgtcgggtggtatatttatgaccaacgtattcccgttactcgtacaccaataaaataattcttccagttcatctaaatcccgtacaggtaacaactcacgcttctgaaaccaattccatgccttactcaaacataccgtatgttcaaatggcagataataggactgtccgttatgcaaatattgcttggcatcgttttgatgagcaatcttcggatcccacaaacggaagtcactagggaaatagtgaaatgtataacagttgtcaattgtcatagagtccggaagcacatttttcctacttcccggctttgtctcaatggtatgattgacacctaccgcacaataaggttgcagttcttttaccaacttatacacacgtggtaaatcccagtcctttacactacgtgcccaacctccatctaaccacagttcacatacctcaccataatttgtcaaaagttcagtaagttgactacacataaaatcaatatactttgtcttatctttgtcatggaatgaaggctccttacgatcccataacgaataatagacagcaaactgaagtccatacttacggcaagcttttgaaacttcagccacaatatctgtcgtgttagaagaagaagcaacatcatatgtcgtagagggactatcccataaacaaaaaccatcatgatgctttgttacaagcaacacatagcgaaagcctgcatcccgagccacacgaacccattgctcacaatctagattagtaggattataagtcaaagctggtatactgccgtcggaccactcttgctgacaaaatgtattaataccaaagtgaataaacataccataagcacgcttttgcatcgcttgttgcgttgcattgggtttgatagccggaacaagtttctgcgcccttaaggggagtactccccataagataccatataacaaaacaaatataatctttctcataacaacaataggtttataaactttaaacttacaaataaacaatagaccacagtccaaccattaattaccaagcactgtccataattttgtgtcataaaaaaacttaaagctacccacctcttattattttattgcaatccacgttgcaggttaataaattatccataaatttgtattattaaggattttaatcatcggtaattggttattatcccttttttcaattcggatggtatttgcggtaccatccgtttttattgctgtcgcttcggacttatataataggttccatcaattatctgacaatcaatcggcaccactactgaaatcatcctaaccagttcggacaagggtaaacgtaaatccaactttccatctacaatttcagtttgtatagcgggtgctacaacaatggggatatcatagaaacggttcagcctctcgaacacactcatcaatggttcgttgtgcaagataagcaaaccattaatccaagccgtatagtcttttgcacgcacgcgcttaatccggctagcacgtccttcacttacaacaaccaggttatcaggcttcatcaaaacttctttttgatatttgtcgctaagcctcacagagccttccaccaaaactacttctgactgtttttttcctttataagcattgacattaaaggaagttcccaatacttctacattaaattgatgtgtctttactacaaatggtctacttttatcaggagttacatccagataaatttctccttctacatatatttctcttcggttatcggcaaagactctcggatacactacccgtgtaccggaattgacatgcatccgtgttccgtccgaaagcgttaattgactatatttccctttaggaacaataatttgattaaacccttttgcctcatctgtattttcactcgtttcactaacagtatgttcttcctgctctatttgaatctttccattagaagaataaacaataccgactgtgtccttatctatctgtactttccgcttgtctgaaagcaataattgtacttgaccacttgcttccgctacatctgccaactggcctacataggcatccaaagtccaactgttatccgaaaactctcctttacctatcacatatgccaacaacaaacaagcagctaccgatacaggtattaaaaatctttttatatattctcttgctcgtgttttcttctcctgtcgtcttatttcacggttgattcgttcccacatatccgtctcatcatcccgttctttacggtcatgaaatctaaaataaccgatgattttatcgattattccatccaattcttgtttttgttgacttttcataaaataaagctgctttatattgcgttttagacgacgaatcagaattcttcaattcatctctctaaaacagttctattactatgacgaatagacaattgattactcctcactttttactacatttttttcatcttctttttatcactcaatactaaagatataccttttttaaaaaagggacattcaaattataaaaagagctgtatttaatatcagcttataagggaaaaagaaaaaatgaaggcatttgctaatacagaaatacgtatttccaacactaaacgactttatcgatcagtatgattcacatctagatattttatttactaataaacactatttggatatataaactatcattttactactcctttcttatccgttttttgatatcaaatagaaaaaaacagctcaaaaagcacttgttttttccttttcaccgagtaagaagagcttccttggtgagaaaaggagcgacgtacaccgattatgaaacgataagttctcatcaaaatattaaaaatggaacactatcataaaaaatttcaataactcattctctttttttgttaaaactgaggagtaacccgatacacaatcgtcattgtaataaagacagcttaaatagttcaattcaagcaaaataactgaactttaaaggaaattgcgaacgaataaattgtgtattaaacaaaaccataaacgccatgataaacaaatatctattatcatccttagtctgtattttattttatacagcacaagcacatccttcaagcaaattgccccaatataatataatcaatgacttgtcctcaataatcaagaatattgcaaataaagacattcaggatgatatactatctcttaccggacaatggggtgtaaagttggatccggacagtatcggtgaaaagcacaactatttcaattccggtcatacaaccatgccgattcagctacccggaactcttgatgaagccggctatggaactcgcacagtcggttcggattatggtatcctcacccgccgacacaaatacataggtccggcctggtatacacgtgagtttgtcattcctcacaattggcagggaaaagaaataacactttatctggaacgtgtgctgtgggagtcaaaagtctggattgacggacgtttcattgatacacaggaaggattaggaactccacattatcatcgtttaggagctttaaatcccggaaaacatcgaatagcaatccgtatcaacaacgacatgatatacaatataggtgataagggccattcatacggagaatacactcagattatctggaatggtatcctcggaaaaatagaactacaatcttcacccacactttcaatagaccggatcaaagtatatccccatacatctgacaatcgcttggatatttccttcgatatacaaaatcattcaaataagacattgaaaggagaggtttcctatacattgaaagaaattggaagcaaaaagaaaatatacgcatacaaaaaagaaataaaaggagaaaaaggaatacaacatcaccgtgaaacattgaatatccggcaagccgtgaaacactgggacgacctacacccaaacctataccggttggagatatgtatcacgcaaaaaggacaatcccaacttaaaacggttgatttcggatttcgtaatgttactgcttcccgatcaaagattctaatcaacaaccgacccgtattcatgcgaggtaatctggattgcctccattttccccttaccggttatccctcttgcgacattcaggaatgggaacgtattttccgtatttacaaatcatacggactcaatcatgtgcgtttccactcatggtgtcctcccgaggcagcttttacggcagccgaccggattggtatttatattcaggcagaagtattatggattgactggtggatgtccgtcgtaagaaaagagcgccctgaaatgaccacacgcggactgccgaaaggattggggcataatccaagtgcagataaatttgtaccggaagaactgcaacgtatgattgaggcttacggtaatcacccttctttcactatgctttgtattggaaatgaattaggcaactcaaactttgatatcatgcaacaatggattaaatctttgcaagaaaaagatccacgcagactttacgctatttctaccgcccgaaagattatgccggcagatcaatatatggtcactcacaacataccccagacaggcggtacttatggcataaacggttccggcactgacaatgaccgagaatctatctactctaaggcaacaatcccggtcatcgcccatgaagtcggtcaatatccagtttaccctctttggaacgagatagataaatataccggtgtattggaagccagaaatcttgaaagcttacgccaacaagccgtaaaaaatcatatagaacaccaggacagaaaattccatgaagccagtggagcattacaaacaatcttatataaaggtttgattgaaaatttactgcgtaccccctcatgtgccggattccaaatgttaagtatgactgattattcgggacagggagaagctttagtcggttggttagattcattttgggattccaaaggaatcatcacgcccgaacaattccgatgttattccaacgacattgtccctctggcacgtttccacaaatatacctggcaaacggacgagacgttcaaagctcaaatccaagtggcaaactacagtgatacaactctaattacacctacgatatggactttaaccgacgaaacaggcaaactgcaacagcaaggcagtagagaagtgcccttatcatccggaaaagtaaatcaggtagattctttatctatcgatctctccgaaattacatcaccgggaaaatattacctcgatgtcaccattagcggcacaccttatcacaaccgttggagtatttgggtatatcctccttataacatgccacaaaccaatatcatcattcacgacaaatttgattcgactgtcattagtgccttggaacaaggaaagaaagtattgttagtggcagatcaactcgggaaaaaggataactccacccctctttacttcacacctttgttctggtctacttctttctttcccggtcaaagcaacaccaccctaggggcatggatagacaaagctcaccctgcattctcgcaatttccaaccgacaattatactgactggcaatggaaagaaataacacaaggccgttcgtttatcatcaacgaacaccctcaattacaccccattgtacaaccggtaagcgacttccatatcaacgacaaactagcttctatcttcgaatgtaaagtgagcaaaggcaaattattagtctgcggttacaacctgaatttggattcaccggtagcacgacaactaaaatacagcttattacattatatgacacaatcgaacttcaatccttcttattcaatagaaattgatacactgaagaagatgtttgcatatactcctaaagcaatggtttccgttcctaaaggatttgaaaactcaattctttatatatcatgcgggaagcaaatgaagaattccggttctgctccttggacagccacgctcgaccatactgaaatacaagacgaacgttgtaaatacaaagttacttgtgataatatctggaaagatgaaaaagggacagcctggacaggcaaaaatatgacaattgaaatacaaactccggaaggtattattggagacttatatgtaaaatttgaagactggaatcaccaaaatagagcagggctcttatcaatcgaaggacgagagtccattttagaaaatcagaaaggaaaagaacggtgggtgaaactattcatcatgcgggaagatacaaatgacggaaaaatagttctaaaaacccatacgaaacaaggaggtaacctaatgattagccaaatagcattcataaaacaataagcggtcaatactctcacaacaaagatttccaaaacagaggccgtctcaaaataaacttgagctggcctctgttgtttcatttcagattgaagttatttggattcttctcaaaaaaaaggagtttacaagcttctttttgaagatttcattctttcaaacagtttttttcgttgccataagcctcctaagaggctacttttgcaagattgtgtgctatggccagcaggccgaactcaatttccaccttcttaagtccacgaaggtggaacctcttgaagtgcttgttgttcttgaggtttccaaatacggcttccacatcctgtggccgctgactgcggtatttaagaccttccggtgacaggagcttttcacgttccctttccttgatttttctcaggcggtgattcacctgtactatcctttctgaccggcttctgtgacaccggcatcttaacgggcaggcgttacagttacatgccctgtatcttgatatggtctgtacaaaaccgttgtctgttacccgctttgcatcggaaagtctttccattctctgtcccatcggacagtacatgccgtcggtttcttcattataataaaagttggcagacaagaacggatcgttctaggggataaaatcgcctaaacatggaggtaaaagctgattatcgttggaggtgtaacttttaaacattatctttgggctattgtacttgattccctaagatacaaaaaattagggacacgggcaagtcttggctgagcgaagtttgggcttgcccattttttgcagacacaagtgagaccatcccaaaatcattttgagacggtctcgtttttggaaaaaatattataagttagtaacgtgtcactttatttgtagttgacttcagatattcgaaacgattaatcatctcacccaacttcttcggatatttatctgccaagttttcctgttgacttatgtccttcttcaagttataaagtttatatccatatcccaagccgataaactcaccgtcttctttgctataaggattaaaataaggaggaatcaacgcccagtcaccctgacgatatgcataattgaacatgccttcgataacaagttcttcacgtccttttttactctttccgaggaaagcatccaacgtattctcactatccaatttttcaggataagtttgtccaagcaaagatgcaaaggaagccagcaagtccatttggcatacaaagacatcagaaacctgcggcttcactactgccggccaacgaagcatgaaagggatacgtgtaccaccgtcaaacatacttgtttttcctccgcgaagcggacctgctatcttatgatcgcctatcaattccactgcatcatccttatatccgtcatccagcactggtccattatcactagttaacactacaatcgtattctccgccaatcccaactggtccagttctttcagaaattcagatacacaccagtctgcttccagaatagcatccccacgcggtcccataggcgactttcctgcgaagcgttcatttggaacacgaggaacgtgtggctgatgtaatccgtaatagagaaagaaaggagcatttttatggtcgttgacgaactgtttggctttatctagaaataattccgccatttcttcatctttccattgtgccgctttaccacctttctggaatccgatacgaggaaccccgtttactatcgaaccggcatgacctacactcggatgcatacgaagcaattcgggattattctttcctgtcggttcaccgggaaagttcttacggtaatccacatacaacggatcgttagggtctaatcccactacacgtccattttcgagaaagacacatggaacacggtcattcgtagctgcctgaataaatgaataatcataccctatttcggccgcaccaggatgaacatccttattccagtctacattaccgtctcccagtccgatatgccattttcctatggatccagtagcatagcctgcctgtttcatcaatttaggcaaggttatcttttccgtatcaataatcaatgctgcattgcccggaagaatttttgcgtccttacttgtccacggataaagtcctgtcataacagagtagcggctgggggtagaagtagctgccgtacagaatccttgtgtaaagcggattccttcattagctatacggtccatacccggtgtagagatgcgatgagcaccgtagcaacttaagtcaccatatccaaggtcatcggctacaatcagaatgatgttcggttgttgcttgttgatcggcttttttctcggttgtgcttgtcctgccaataacgtgttaggtatcgaagaaatacctactaatgtacaaaatacatactctaagtttctcatgccttatttaattaagatttatcacttgctataaatacacatcaaattttgatgttccccacacaaaatccctgtttctattcataatttatgaatttaaaacgttacttgtgttttagcaccattcgctgcaatagcatttactttataatcttcgggtaacgtagtgtttacagtaaacgaagattgcggtgatacaaatattacttttcctgcatgatcgctaacttcataaacagccacattccgccaaccatacattgatagtttggaaccggaacgggtagctgttccggcaactacggctgcattatttatataagcctctaagttactatcacagatatattccagcttatgtttcggaacagaatatcctaaatttcgaattctatttttaagagcacttacctgagcttccgtcactaccacttttccatcgccataagagtcgttgaattcatatgaaccagatttcagaaaaccccattttacaaagaaatccgtcaaatccaatcctgccgccttactacaattataggcgaactctatttgacgttcaccatcggtaggcaagtccttattgacacgtatatattcatatacatccttataaaaatccgtttttcctaatacatattccatatataactctaactgccaaaaaggtactaatttatcgaatacatctcctaattttgcatgaaaaatatcattattcccgaatgctaaagtcattgcatgctcgtagtaattactgtaagcattacttggcgttgtagttagcaaacgggaattaattccatataatttctgaatgtacatcgaacaaatattgtttgttacttcggtcattccaaaccatttcagtcccggacgggtttgattactatgccctacctcatgggcaggcccccagttgttagtcttcatttgatctacactgcacagattatccatcgttgaaaaatgatatgccgtatgataagaagtggaatacatataatctccctgtccgtacatgacattgaaatacatacggtttctgaacatacgattgtcggtatccgtaccgatgccaccattattgttgtattttctcaaacccatgaatatctgttccttatatacaatatcatcaaaaaggttaattaaatctctcccattagatgtactttttagtttgctgacaggaaaagtgagatgagcataattccctacaacatcaaaatagccatcgacagctccgtttagtaaagtaccccactgttcacgggtatgttttgctacatcaaagtatccgttaacacttcctgacgcaaagtgtatctttacctcgtcatagtctaccggattaccattgacatgatacatcacatagattaaccctttcttctccgaaacaattttatttatacctgtgcgtaagctataagaaatgctgttattgaaaccatcagcattaggggtatccatgtcctgtactcttagactcaaatgttgcccgtgcgtttcacctaccatgacaatcaatgtttctcccgctttcacaaagatacccgtaggattatccaatagactataagtgcctgtcttattgatagtagcctgtatatctggatgttgataaggtttgaaatccgcaatacggaagtcagccggatatttatctttcagcatataataagctatgttcttaaaaaatggataagtacaggcctttatcatttcctctgttatatcagaccgtaacttggaacaagtaacatccataaaaagggtcaatgggtcaaaaccttccggattcctagcaaagaacttcatttccgcacaggaagcatgcccattcacaccggacttaataatcaggcgaactgccttcggtttctgtattgtgttatcaaaagaaaaagatactaccgcacctttggaaccgaaatcgaaattggtttcattcgttacactttcaaaagccgggtgttcttcagtcgatacctgaatttccacttcaccaaaattcccgttcgaaccgcttatacgcggataatagataaagtaatcaagtgcttccgtattttccttgaaatagtaagtcaacatgaccggataatggcttgtaaccccttctgcaaaaggataattagaatgataaatagtactcatatcactatcaaaagatttttcaatcccttcaccaccatgtgccgtagatgcttcccctctgactacttccaactgaacatcatccgcaattccttcagtatcaccaaatgtatatccatccaatccattctgaataactgtaacttctgctgaaatattagagttcttatcctttatcactatcttctccgtacgtacactacttccctcatgagtatctacggtaaacttataaggtatttcaatcgttgcagcacgtgtgtctacctctttctttatccaagaaggataggtgacatccagttccgcttccgtcagattggtagtgacagtaaaagcgactgttccacctaccggaggcaaagtaaaagcgaaaggagatactaaaatatcagtatcagtacctaactgacgtacaagaatcttcttattcaattttccattattgataaccaccgaagcattacggacagttttgttcgggttacttatcacactaatcttcacacctgcacccgaattgacaggttcagtcttacaccactgttctccttccacatccacagaagcggtccaatctgcaggaagtgattttacatcaataacaacagagcctgcttctttataaaaatctgcattttccaaacctagttccaatacagccaccacatccttatcatctttacaggacgacaaggaaaaaagaaacagggatatgaatacatataaaaaataattcttcatattcttttcgtttaaaaaggactgactaaaaagaatttatgcatcactgcattatccccttgccagcccttaagattaattatttgttagatttaagagagagcagttatttaccatataattcaaactccgagagtgcccatgtattaaatttactcggattagtagaactatgaacctcaaaacgaacataagtatatgaatcgcctagcaacatcgtcggacaagtatcataataagtggtagccgatactggaagaccgtctgcttctgcggtaaatacttttatttctttccagtttgcgccatcattactagcataaatgatgaacttagtaggatgctgattagtatttctagttgcatatcttactctcaacttggaaatagcactattcagatgaatatccacttgatgcgggaaggcgggcgcacctcctccgtaagtaacttgtgcctgagtagccaatttgccatccaaccagtcggcaaatccattaccgtcagcaaaatttgtgcctatcaaggtcatcatatccggtgtgagcgtaatcttcggtgctgaattctgtaatccgataataactgtattttcaccggaaaaggcatattttgtagaagttatttctaacggaagtgcaaagttcccttctagattagttatatcaatcttcacggtcagattcgctgtaacattacctttgctaaaggtcagtttaccgatagtatagttgttgcccttgtctgatattaatgaatactcaatgggagatgtagcattatattcatccaatagttcctttttaactgttacatcgcaggttatatcttctgtgagagcagtattcaaagtcacaggaagctcatatatatactcagtcacaccttcagtaatagtaaacggaagtttaaatcctgactctgaaagagagaaagcaggctgataaacagtaggcttcacgatgatatacttatttttttcattaatggtagaagtaccgtccgtaagctccaacatcaacacataagtgaaattacccgtactcaatacagaaattttctcaggatgaaaggttaccgttttaatcttatacagttctttttctccaaaagagacggtcatgtcggaaggcaattcataacaatcagcaggcaatggcttgaaattagtcttattctcattattgtaatattcaatatcgaactcattcaatactttcaatgtagctgaagctaacatattcaggtcgtttccacctttgtcaatcgttatattgtaagcagcagactctccagtattataaaaggtaatatcctgctcattactattcaaaatgcaaaggaatgattcataatcatccagataatcgtcttttccatcgttcaagcaagccaccatagtcagcaacaaaccgcctaacaacgaaaggatatatatttttgtcttcatataaattaaaatctgattagattgttttaatgctataattctatctccaattataattttgggtcaatagtttgttacggtctagttctctctgactgaacggatataaaaagtgattagctctaaacacacggttttgaactactgtcctacgccaaaaagtatccggagtatcttccgtgttaacagcctgtgcctctacattcataccatagataggtccattatccgtagttgtagcaatcatccatgtacgagtatcaaaaaaacgatgattttcaaatgcaagttctatcctgcgttctctgcgacaaagttctatcaattggtctattgtagcttccggatagacttccgttattggatccatacctgaacgagcacgcagatcagcccaatactccatagctgttgtacgatactgactgtctctcgatcttttctcccattccaaagctgcttcaataaagtttaagtaaatttctccaagacggaatgtcggaaataccatattacccggttgattattcacaaaactagcagtatgatcacaaaaacgattaactagatatccacttctcgaatggtcatgagaagtatttgaattaccatcttttgccaagttacacaatacatagtcatctttacccggaccgcatctccagtaactatcactccaatacacagctatataaaaacgtggttcacgattaataaacatattccgagttgctcttttataatatttagcctgatatgtgtcacctttacttaaatattcaagaaaaggatttgcaaattcagttataccattttcactatatccagagttttcgtcaaccttaggagttccatctatctcgtatccagtaatcggatacttaccattatccatcgcataagcatccacctgttgttgcgagggtcctagtgctccataagctgctccattacctccttttttggtctttacacccgtcggagtcgttcttctggctataatagcccgacttgcatatccggtagtccagataagttctttgttccaatctacctgcgtaatgccaagataattagcatacgggtcatctgaagcgtctctatgtaactcgtatactcccaaatctatgacagctttggcagcctgcactgcttctttccatttttcattactataagtttgaggaaacagatattgatctgataattccggaaaatcgggtgttgtaggattctttacggtattgtataaactattaccattatatagatcacgggctgaataaagttttaaccgtgaaatcacagctaaagcagctccctcggtaggtagcccatattctgcatctaccgtccaagttgttttcccgtgttctttaaagtaggtagcacattgagtcatttcatttacaacataatcaacacattgttcccaagtattacgcggacgatatagagattctgtcgtagcatcatatggcaatatctcatctcccaacaaaaatataggtccgtaattacgcatcatcaagaagtaataatatgctcgtgcccaacgtgtataccagtaccattcatccttttcttcctgtgttacggtaggatctgaacaactgtaaacattctgcataaaaatattacattcacgtattccgttatacaaattaaaattagcacctggtacgctggatgcattccaagctcccgtattcattgactcagcagctgcattcgatgcattgatcaattcatcagtagcagtgctttgaggagtactaacatagccagtcaaatcatttggcaaaaaactcattgcattcaagaaatacccgcgtgtatatgctctcttctgccaaagttgttcaaaagtaagatcttccgtttcctgtttatcgagaaaactttcacacgaagttaacaaaggaataaccccgcaaaataacaatatatattttactaatgatagtttcatattgattctgtattattgattagaaattagcatttaggccgatagtaacggtcatgttattcggatattttgctccattggtagtatccagcaattcagggtcccataatttaaacttactgaatgtaagaaggttcgtaccagcgatatagaaacgaaaagacttaataaaggtcttgttcaaccaggtttttggcaatgtatatcctatttctgcgtttttcaaacgaagaaaactacggtcacgtaaccacatagtagacgactggctattgttagaactgcctgcttctgcaccgtaactcaaacggggatatttagcagaagcattctgttcaggagtattggtcgttttccatgaatacttataaagatcttcatagatagcagaacgatccatattatcactactgaaaggacgcaaaggtgtacccgctaaatagatagaagtacgcgctaccccttgaaaaaatacacttgcatcaaaattcttccattttgctgtcaatccgaacccgtatgttatctcaggaagatcagtatagccaatagcaatctggtcatacgtatcaattttaccatctccatttacatccttgtacttaacgtcaccaaccctatattcaccaaacatctgtttcggactattatctatttctgcctgactttcaaaaaatcccaaagcaataaatcccttacgttgcgctgcaccattacggccaaacggtttgccaatagaattttgatatttatattcccaatctggttcatcattatccaacatctggttacgcgaaaaagtaaagtttccgcgacctgtcagtaaaaccttacctacctgttgctgatattccagtgttccatctagaccagataccttcgctttacctacatttacatatggagtagtagtaaggccgacaatagccggtagcccagcacgagccagaaagataccattacgttcttcataaaaataatcagcttgaatctttaatttttcgaacaaacgaagttcaatacctgcatttaccttagttgcctcttcccaagaaacatttgtattctcaatttctcctacacgataaccagtacctgtctgatttgcagtttttccgtatgaccatcctgttactgtattgacagaaggttcataagcccatcttctggaggctccaatgtcatcattacccactttaccataagacgctttcaatttcagatcattaactactttagtcaacggttcaaaccatttctcactggacaccatccaacctattgcataagctggaaagaatccaaaacgatggccacgagcaaagttctcagaaccagtgtatcccatattgaattcggcaaaatatctatccatataagcataagtcaaacgtcctgccagtccctgacttttatatggtaatgattttttctgattctctgctgtcaataacttataaattttatgattgtacaaaaacaaagctcctatccgatgtttttgagcaaataaacgagtataattaagagaaccttccatataagtagtaatcttagatacggtcactggagcagcatacgacagattattggaaccctcatatattgttttataatttaatgaaccgtcttcatttcgacctgttgcatgaaactgaggtggggtctttgaacgaacttgcaacgtattattagatgcatcccaagaaaatttaatattggcagttaaccctagagttatcatatccaatttttgagtaacaccaatcaatgattgggctgaattccaactttgctcacgataaccggaatgtaccagcagattccatggattactaccactggctgcacttggtgcagaaagagtaccatcagaatattccacaggaaatgcatttggagaggtgttaaatgcatatccccaaatatcagatgtcgtagctcccggtccccacgaactttcataaatattagccaaattcacattgaatgttgtagtcggtgtaacggagaaatccatattggcacgaaaattgaattttgtataatgaatagaagaattataatcataaacatccccggcgtttctaaatatagagccttcattataaaaaccacctgatacataatacttacaaatatcaccgcctccagaaaggttcaatgtcacacgttcgctcgaagccaaatttcgatacatctggtctaaccaatttacatttggatataaatcaggatcagaaccatcactatatttttgaatagcttccgatgaatagcctccatcaccattacccgtcaggcctttagcctcattatacatctcggcccattgtacagagtttgccatttgcggcatacgtgtcggagttttaaaacccatttccgcacgtacattaatacgaggtttgccttcactgcctttcttggtagtaatcaaaataacgccattcgcaccacgtacaccatatactgccgaagcagaagcatcttttaagatagaaaatgtagcaatatcatctacatcaaccaagtccagttcccgttcgataccgtcaaccagaactagcggagtagagttacctttaaaagaagctataccacggatataaaaatcggaagcactatttttacccggctcaccggatgcctgcatagagacaacacctgccagttgccccgccagtacattggagatgttagaacccggtatattgagttcacccacatccaatgaagaaatagcacctacaacactttccttcttctgacgtccgtaacctactactacaacttcgtccagcttctttgtatccggatttaatattacatcaataacattcttattgctgatagctatttcctgcttcttcataccaatgtatgaaaattctagtacaccaccaataccttcaattgtaagagaatagtgaccgtccaagttggtaacagtacctgatgagctatttttcaaccatacactagctccaataataggctcttttgtctctccgtcaattatagtacctgtaattacacgttttttcggctgttgctgttcggcattttgagcatttgctactttaaaaatgacttcttttcctttaattatataattaactccacttccattaaatagatttttcaagacttcctcaattgtaccactacaattaatctctttttttgatttatctttcaagtcactatctttataaaagaaagtataatcactcgtttcttctatataccggatagcctccttgagagagaactttccctttatctgaatattcccttgtgctgctaacatcacagttggccataataataagagtaatacgagatagctcaaataccgctgtcgatacaaaaaaatacattttttcatgttctcattttattagattagacatatagtttattaaaattcaatttctgataatgattgtgttacctactctttcttctttcaaattcataaggaaacagattttgagaataatatcatccaacgcttcctcctgacgaatggtaccactgaacggagaagtttcgtccttaccttcatacactatattagcatgatacatctgattaatgatagaaatgaggcggttaagcggcatagcgtcaaacttgaatttaccatcctgccattctatattttcaatcttccgtattcctatttccgcattaactgagttataaaaaatcttttccatgggcttcattactatctgtttgccggtcgcctctacattaaactcaacacaaccgttgaacagcgtaatctcattatttcccgcttcttttttatctactagaaaccgggtaccttttacttcgataaaggctttatcaatataaactttgaaggtgttcccatgctgcttacgtacatggaacatggaactaccctccaaccatactcttctgtctttattgaagttcttggcaaaacggatggaactattcggatacatccatacttcagaactatcgggcaactgatacaacatattccgggtggctactacctcagcaaattcttctttaacgaagaaatcactattcacataaaaaagccaacctcccaaaactgcgactaaagccacacaggctgctgccaacggataatagaactgtcgaattgacttacgtttcgaacgtactttatattctttgactattttagcccaaatataatctccgatttccggatctactctttccgagttttccgctatcggattttgttcctcccattgcactttcattttgcgctctatcatatctatttcggacagatcctttaattcgtcttttttcagtctgtctgaaaataattttctaattaattcacttttataactcattacttttctctattatttgttattctattattaaatacacatcaaaaattggagaccctggtgaaaaagcaattttttttttagaaagtatttagctaattttgtcccaaaaagataaaatgatatctaaagagttgattagaaggtttaaaaatggagatgaagatgctttttcatttctatataaacattactgggaaaaggtctatggctttacccggctttatctagtttcttctgaagatatcgcagaagtggtacaagaggttttcatcaaactctgggaagcaagacatctgatagatgaagagcagccttttgaagggtttctttttatcattacccgtaatatgatttttaattattcacgcaaaaaattaaactactcatttctgaaagttactgttctacaagcaatggaacaagaatatgaagaagaaaataagttggaattatccgatttaaaaaagtatctttcagtactaatatcacaattgcctccacggcagcaagaaatctttcgcatgagccgggagcaaaacttaacctataaacaaattgccgagcaattgtctatcagtgaaaaaactgtagaatatcatatgggattggcattaaaatacttacgaaaaaatctctatttgctttctctgtttttgtctgtttaaacacaataaatacacattaattcctccaatcaatcttgattgaaggaatcctgataatatcattgataattgaaaaattctgttggtatgctttctgttttataattaataagaagctgttgccggaatgccggctttcttaatcaattctacaatccggtccaactcttcgtgagttgccttctgcaaatcatgatcaggggtttcacggtcaatcgtgtaaatcatcacttgccggggcgcgatttctttcaccgcctccaaccagggaagtacaaacttatctgaggtattgtccatatcctttcccaggtaactccctttgagaaacatagtttgaatgatacagtttcctttgaattctttcatcttctcgataatcttctttacagaatattttccattcggacgatctaaccggtgaatgtattcttcatccactgtatcaagtttcaagatattattatctatcttattcagtgcatcaaatacagcagggcggtcgataaatgtagaattacttaatacactgactttcgctttcggaaaatacttgtcccgaagtgcaagagtatcatctatgatttccgggaaatggggatgtgcagtcggttcaccatttccggcaaatgtcagtacatcgggagcaggaccatttgcctgcatatcttttagtttttcttcaagggctgtacgaacctcttcacgggtgggaagaagcttctttgtacgatgctcggcattgaagccgcattcacagtaaatgcaatcgaacgaacaaactttaccgtcgtccggtaataaatttattcccaaagaaacacccaaacggcgggaatgaacaggaccgaaaatgggtgaaggaaaaattacagtcatctttttattgtttaattagctacaacaaagataactcaaaaaactccaggttattaattctattgaacattttttaatgatgttcttcattcgaccggtatacttccgcaaaacattcccctgactataactgcactgccattactgaaagaatgccttactttaacttcttacgaggagacaggtgtactacttttctcaataagtcgatcgtaaaattgaaatcactgaaaaactgtatacctatcgatccgtctacatcggtatgatttgaagaatcaccgcccgttgaagcttgaagagtgacaggtacatttttgctcactacactgcccacttttaatgaacgtgcatgaccataaaaaactggtgttgaatgccccaaactcactgtcgccccacttccctcgggtttgaatccgctcagtaacagcctgttttgacgaacaaaccgactaaaagctatcaaataataattagctcccgtatccattataaaattacccgaaatacttttatccccggtcagattcaatgcggaaggtaacatgataaggctcggtaccctaagggggatcatacgtcctttcctctgaaagatataatcaccgaaggtataaagcgaaatagtttgcgtatcaaaattcacttcagtgatatattttcttatcagattcagcccgatgatgccatccgtaccgttacgcaccctctcgaaaattgcaatattctgctttttcaatgataaactgtccgacagacgaagtacattatcggcagatatctgcaccgttttccgtccgcctacaacactcgcttcttgcgaatgactgactttcagtcctatgctatctgccaacgaacggcggatagccattccgtcagctcccgtatcaagcaagaatgacatcacccgggggctatcgttcaagcgggcagacaaaatgatagagccaccctctatccgaaaaggcagaacggctgccaacgatgatttccggtaacggctatcaccgaacagccgatcgaaataatcgacaaagagaatttttccagactcattgaaagctatcatgctcttctcttcttgtccgccggccaatgtgaaacggacctccagactggtgacgtttccctttgttttcatccccttccagtcgggttggatagattggaaagttataccttccataatctgtttcaacaaaccggatgcaaagggcaacgaataaatgctgatagaaaattcgggagcaaaactcttttgtgcaacagcgatttcttttgttttcaaaccgtcttccatgtgtttcaaagcaagacggatgctgtcttgatccgcttttccgtttgctgtcaacggaaagaacagaaagcatataattattttcaagtatttcatagtctattacattgaaaaaagggtactgaaggctatgtattggacatatagatacaacgcgctggacatatagatacaacatgttgggtatatatggccaacaaacaggatatatatacccaacaactctgctatcaatacccattgaagtgcttgtatatcagtctattgataatatcgtttattttttcaatgcgtcgttcaacactgcccgtatctcggaagaagaaggacgcggagcatccatataaagcagactgccgtctttgccaaccagcataaaacgaggaatacctgttatcttataaggtttggacaatgcaggtcctgccatgtctccggcaaaaagctgtacaccgggaagctgttcttttatcacgaagtccttccatttctggatatttttagacgcatcgacactaatccccataaatacaatatctttattgtctttatattcggcttccagtgctttcatagccggcatctcctttttacacggaccgcaccaggtagcccagatatcaatatagacaaccttgccacgaaaatcggaaagagaaatatcatttccttccgcattaggaaacgtcaagttaatgatttctttcttctccatactctctctaaagttatcttcaatacgttgccaacgctctttctgactgtcggtgatgaggaaactgccatattctttcttatattgttccagtcccacctgtgtcttgctcattccgctgaacattaacgctatttctcctttaatagtgtcattactaatcatcccaacgtcttctttcaacatagccgaaacgggattctttcgtttctctccggctgatgaggaatcagataccatggacttgagcatatatgcattgacaaataaacgcaatccgttgggataattgagaatgcctgcagtacgggcaatagcaggaatatctatctgccggtaataatcaataaaatcctccttctgcggatgtgctgtccttaccgtataaatgaactgtacagcattgaacagcaaatcatacttacgaaaatcagcaaacgtagtgtcgaaaaccttattctttgttttcttcactttataagaacccagtttatccagtttctcttccaacagcggaaaaaagtctacatacgtactgtgttttcccataaaatacacagctttatcttccagaggaaaaataaaatcatgccaacgggccatttccttgttctccgccgtattctcttttcctatcagttcataactttcgggtaatatccgcacattcaatgggtcgcccggcttcatataaaatgtataacgattctgaaataccgaagaggaagtacccaacacgaaatacccttcctgctctggggtaaacgtcatctggaaactaccgtcttctcctaacgcagaagtggccacttccgacaagttaccgccttctacaatcttgaacattttgactgcttttgttttacccctttcccacacgccactgacagtagatgtttgggcaaacaaacttcctgcacagataaacgcaggaaggatcattaataataattttttcatggattattcattttgagtatatatataaaaatctttgcaagaatagtacttcgatttagctaccatattattcagtccgatatagcgggcattcacaggttcggcaaacttgaagtacatgtgttcgcatcggctgggaagtgctattgaaccgaggctcaccgaaagacgggtagcattatagagttcctctccggcataagacaagtccatgcttgcaggagacatcgagctattgttcgccctgagatatattccggtgatattgcgaacttcatgtcccaaatcgattgtgacactggccggaacatccaatacccagaaacctccttcgaacatactttcccaactgccttgagtaaatttatattcttccgacagggctttataaccgctcctttctgtctgtcgcacaccaaacgcagtatcatcgctttcaagcgtgtacccaccggataccgaattcactactagataatatacatctgtacgcatagtcttgacaggctctgccgcacccggtgacgtaaccgattttatctttatggggacaagataattatcacccgcaaactgcgacgtctctcccttataggcgatatgtcccgtagccgttgtactgccggccggtaacgcaacatcggccaattcccagtcactcacggcaagggttttgaaagctgtcccatatttgctattgaaagctgctaccagactattgtctacttccagcccgatatttatatcattgtctgacgcaatataagccataagcggcagatcgtatccggtgaaactttcgtttcctgcaaccatcacactgtttttaccttcttcaaatcccacaccgttctcctgtgtcacatccaacgtcagataagagactcttttactgtaatctacttgtgcatcatagcccgaagccgaagtgatacgcaccggcatgatgtatccgtccatactggtaaacccgtccaaaggccgggtcaaggcaacggtaagtgtatctgcagattccatacttccctcgggaatggtcagggtcgatttattcaacctgatccaattacttgcaaaccggtgataggatgtttcatttttcttattgtatacatctaccaacaatgtatcaatagtaactttcaccgtcaaattgccacctgccggagaagtacaattgactaccagtttggcaaccaatgtatccatattggcaaccttaccttctactgtacgttgggcattgaaagcaagtgaagcatacttatcgctgataaatactttgttagaagcttcagcagctgtctgtttctcataattgttgatgtcatccgtgcatcctgcaaaaaagctgcatgaactgcaagtcaccagtaacagacatattatttttctaagtttcatatttttcatctttctaaatcgtttaaggtttataatccatacctactatctttccaaaacctttccacgacatctctatcgtttcatcatcattcaccttgtgcgtcgctatggcaagtgcaccggaagaagcattcggcatggaatagaagtctattctgcctccttcatcctttcctaaggaactgttgtaggtagcgattcccaaatatttactgcttgtactgggaatcataaactttaaagcggttatttcattgtaaccttcgggaagaaccgcatccgttatttctctaaccactgcattgctacccgatacgtcggcataaaacacccggttatcttcagttgcataatagataaacgcattgttgggttcgggagcggcagcaataaatttggcatggtcaatgccggtagacgcatcaaatatacacgttctcaatttattatctttcgtcaccaaagcagtagtgttagacggtaaactatactcaatatatttaaatgtaccgttgctttgtttcagaaaagcaaaagaggtcattttacttatagtggtatagcgttcgctcatatacagcaatccttcatttttatcattaaagttgaaaatatggtcggaagactcatccagaaaatcttcggtaaagaagaacgatgtactgaaatcactggaagaacggtatgtagtctggcaactgaatttattttgttcctgattgaaaaacatagtaattctgctgccacacgatataaacggagcgggttcataacgtttactatcgtatacggtattccccgtacgataagcattcatcggataggaaaagaagtagtagacaggataagtgttgtgcaaataccaattcccctgtccgttatcatctttcatatacatatatatatgcggttttatattaccattcaaagcaaaataacccactttcatcttttccgctacaataggccgcccaactgatacatagtcttgatgaagaggcgaaccattttccacggaactggatatatcatacgaaggatcccaactgaaatctgctactttcaaacgtgtcgtataatggtcggtcagcaagtaaaccgaacgattagaaccatccggctgatatggatgaggagcagtagggtcagcaaagatattgagttcataaggtttcaccccttcacgttgcagggaaggtgcggtagaagccagtatattatacttcggtatatattgattctgggaattctgaacgatcattcccatatcaaatccatcttctttctcatacaataagacatatcccttgttgaaagttcccgctactcttatactgaaaatttgtcggtaagcaatatccgtcactttgttttttgcttcgaaggcacaagtataagtactattcggagatccgataggatcagctataacaaaatcaaagtctttaccctcctgcaatacattccatgcagaaccgcttttataataccacgtataatccagattgtccgtattacccgaagttgtattgagttcaggagtaatcaacaaccgttctcctacttccactgaataactctcctgaatgttagcaatttctgtcacccgattgattgcctcatagtcataattgcccttgtcttcattacacgcaaacagagacagtatcccggcacatacaattattatccgtaaatctattatatatttcatatccgtcatcttttattgaatactcggtagaggagtcttgacctcttcaccaaactcatccaccaaaggttctccatgttcttctttatattttactaagtaacgattaatcaatgaaatcattccaaaagaaacttccctcgaaaaacgtttggtaaacgtttccttacccgtcgggtcgttatcttcgggatcaatctcaaaatattctctagtcactccgcaagcctcatatatcacattcatttttgcattactgtatgcgccgaatgtactttctaaggtcatcgacgaataagaagccgcccataaactgggtttttcagccagtgccgtaaaataaatactataaatcaatccgtttcgattgtttcctttatcatatctggacgttgaataatccgtatgaaagttttcattcgaagccaaccggatacgggcaaacaacatttcattatcaacggcttccgtacgtttcagccttacttccacattaccaaagattgagttggcaggtagatacgcagacaaaatctctatatcttctccttctgtggctgtcgattcttcaggtatcatcactacttttaccgcccggtctgtttccgaaactcgtcccattagtttgataggaatcttaatgatactgtcgtttttcaacggcctgtcatatcccatattaacagtgatctgatcttcattttctccaaagtcggaagaggatgcatcagcatatttaaaataaattcgaggaacatcttcataagtcattaaatcctcgtcagcgcaagataccattcctatcccaagaaatagaaatgtataaacacaccatttaaaactgtttcttttcatattgaatttatttttaaagactaaattatatatctgtttcaatattcggaataggtatattatacattgcactggcatttactgccaccgaagttcctccgtatccgggaaacatctgatcgctcttcatccgcttatgataaaaataaacttgcccttccccataaaactccttataatattcactctctatgtgggaatagaattgttcatccatatcattctccgtcaagtaataaaagctagtctccggaatgcctctatgagaagaaacagtgttcaatagttcggcagctgtctttttatcaccatctttcaaggatgcttccgcctgaatataatacatttcagtaacacgaatcaacggttggaaatcgaccaacgcgggaagattactattggctgaaatattaaacttgttagagatgtaggtaccattttgcgaataggagacagaacttcctccctggtcgttactttccgtccactgccgggcacggacatctattattgctttcaggttatcaccaaaaccggaatagatgttttgaaccaaattatcacggtctactgcatataaatcgtttatatccgttttattataaaaggagttataattggaaagcatatccggattgttgattccaaaaactacttcattgaagaaagagtaatccatattggcaagtacggttgtaacatttgtccatgagaacacttttcctttttcccctatctgatcagtcactaccttggctgctatagccgcattcttatagtctcctatatattgcaatacacgggcttcgagcgctttcaccgcataataattcatacgtctgttacgattcttataaaaatcacttatcagctccttactaatagcagagtcatcagacagaatagggtcagcagccaacaaccgttccgcctcacgaatatcctccaataaataatccaaatattcatcggcagtggagtacacatcttcttcataaccgacatgattcagtatcatatccgtagttctactatacggcaaaatcttattgatattcgaacgatcttcccatctggggccgaacaaacggaaaaggtcaaaatgaagataagcccgtaatccgtatgcctcacccatcaatacatctttattgttactaccgataacagcagtcgatccctccatgcttttcaaaaaatagttgatattgagaagcgtattatatccgcttttccatatatcggcaaatatgctttcagctgctccatactcttcggaccgtccgttacagaggaaaaacaatgtggcagacaatttatttcccgacggttgtgacggaggataggtataaaagtgccccattgcgtccagagcagtctgagataaattcgccccgtaaagggaggtagatattaattgcctgtaaagcccgtttaaagctccatgaatacctgcttccgttttatactggtcttcttccaataccttgtccttcggtgccacatccagaaagtcgctacaggaagtaaagaagcctatggctactatatataataaatgtgatatatttcttttcatacttaattctatatttattcgtgtattgttatcgttagaaacgagcacttaatccgaaagatatggctctctggaacggatagtccgttcctctttcccgtttcatttcgctcaagtcgaagaaatcattgaatgaaacattaaaccgcaggtctttcaggaacaaacgcttaatccattcgtctctggaaaaatcccaactgatacgtgcactttcgccacgcagataattgtcgcgttgaacaaagcgagatgaaatcggagtctgggtagttaatgaaatacccttgaactgtgatacatcaccggcattctgccatctgctatacaaagcacgcttatcctgattataagcaatgttcgatgcagaaatattttctaccttgttaaacaaagccgagttgaatgcaaacgaacctaagttataacgtaagttgacacttgcctgcaaattcttgtaagtaaacgatataccgaatacaccccgtattttcggattggtatcggctatcttcacacggtcgtcagcattataatcgaatgtaggagttccgttcttggtgagaaatacttccttacccgttgccggatcgatgcctaacgaacgaactgcaaaaagggcagtaggactttcaccatcctgatactgtatcattgagtttacattcaacttactatctaccgaagagtctttcttataggcatcgttcaagttagctagagcttctccaaatcctccatatacagatttataagtatttccgttcaaacggaagttcagcataatgcgcttttccagatttcgtatagcataccaactcacattaaactcaaaaccattagtattcaaatgaccgaggttaatgggtaaagtagacaaaccgctggaaggcttttgctgaatagatactaccaatggattggtatttgtatgatagtagtccatggtcaacaacaaacgattatcccagaacataagatcaatacccacagaggtcttctttacaacttgccactccaaattaggattggcataaccggacaaataagaagcagtaccgaaaatatcgctacctgcataataactatatacattacttgtcaggttactgacattctgattaccgttactaccaaatgaaccacgtaattttaattcctgcatccagtcccagtccttagcaaatgattccttgctgacattccaaccggcccctaccgaccagaatgtctggaatttcttatcgcgcccgaaagaagtggaaccgtcactcgaaagactggcatcaaacaaataacgatacttatagttataattgaaagtccccagaaaacttactccacgactaatgctttcgctatatccgggtgtcgaattttctttaaaggaataagcaaaagaaggaatggcacctactcctttcggaaaaccggtagctacaaatgactcggtatttgaagaagtagacctgatttcagcgcggccattgaaagtcagattatgatcattcaaagaaagtgcataagcgataccggtattcatggtataacgccaacttctggatttcgatgaggaatattcaccttgtttggtataatccgacgaagcatacttcgtatgagccggatcggtgaagttcatattgtcagtgttggttgtattcaaactcattgaggccgtccaacgcagattatcaataatataccaattaaggtttgtgttattagtaacggacagtattttagatctgttttcggaaggcaacatagcattgtaatatggattagtagctgttatatcggcataattcgcacgtttatacacatccagatcacgagggatagtaccgtcttcattagtaaccggataataaggattagcatttacaaactctgaaaaggagccccatgcaccattatttccatttgttatgtttacattcaagttattcgaaatattaaacttgtttttacggtaagtcatacgcatatttcctccgaatgtctggcgaacagaacctttcataactccttggatatctttgaacatagcacctatctgatacaggaatcctttgtcacctcctgacacattcaatgaatgagattgtgtgacggcagtttggataggtactttcaaccagtaagtatctactcctcttctcacattctccaaagcccgctgatattgtgcaatgctttctctgttgcctgaccagtcattcaaatcaccataacgaccggccaagacttcaaattccagtttttcggcagcattcatcatgttgtaaacactcaagtcggcccatgccacttgcgcatctccactataattgatcatcacttcaccggctttgggtttaatagtttctacaaccaccacgccgtttgctccctttgaaccgtaaatggcagtggaagcagcatctttaagtaaagtgatagattcaattctattgatatccaaatcattaatctcttgcaggctagattcaaaaccatccaaaataaacagaggttcattgggattggtcgtcgtatcatcataaattccggaaatagtcatcgtagtaccaccacgcatggtaattctggacatggtattagggtcggaccccatcgacatatcatcagcaactacgaaagaaggatccaacgtttttaaactttgaagcacattaatattacccacagccttcagttcctcctgattgactgtcctatacgaaccggtaaaccccattttattacgttggataatacctgcctctactaccacttcatccaatgctttggtatcggttttcagtaccaccgacatctggggtttcggagataacgattgggattgcatgcctacataagatatctttatccgattgctttgaggcacattgataagtctgaaattcccgttcgcatctgtaatcgtgcgaatagaagttccttctacctgtatggttgcaccaattacaggtagtccgtcttcttcagcaataattttaccttttacttccgaaataacattctgaggatttttatgtgtaatattgatgaattgcccttcaatgacatacttcaaaggatgcttcccaataattacctttaaaacttcttcaatcgaagctttctccacctttccagtagaatgataagaacgaacttcatcgtagataaaaagtactttatatcccgataatttctgcaaacgtttaaaaatagaaggtaaaccttcatttttaaattccattgttatttgctttccattaccaacttgtgccttaacataaggtgaatggacataacagaataacaaaagtaaaacaatcaatttccatgcttgtctttccataaatccgattggttaaataaatctattttttatattttatacgagttttataaaagaatggttacccataaacagatttattttccaaaaatatttttctaaccggatttatttcttgctgaatagttgttttttactcgataataaggctttcaccttctaaatagacatgaattctttccatacgatttaacaactcaatcaaatcagaaactttctgttgacggtttgccagaaaatgcatacgcagattcattatctcactgtttctaaattctatatctatattataccatttacctatttctttcatcatatccaccaatgctacatcgtcgaaataaaagaatccctccttccaatacaagaatgtttccgtatcaacttcatcaacggcaaatgttccgtctgaaacgagttgtgcactttgtcccggcttcatttctacagtttgtaaaccacaggtatcactgacggcaacttttccttcgattaaggtaacacggacattgtcgggggtgtagctacacatattaaattctgttcctaatactcgaacctgaacatttccactttttactataaaaggatgttcagtatttttggttacattaaaataggcttccccttccaaagaaacaactctttcttttcctttaaacaccgtaggataagacaagcgactgtccgaatttaaaagtacttcagtcccgtcggataaaactaccttaaaagtttctcctctcggtatacttaatctatgtatctgtacttttttatttcttattttcttattctcagtctgaatagtattataagcaatcttctgcggtgataatttcaccgtagaagagggaagtgattgcactgcttttttcaaaggttcaactttttcttcaccggcaacttgcaaagtaacttgctgcggggcgtggtctgcctggaaaactttaatactttctatatccgattccagagaaaaggacatcatacgtaaaaccagtataataatgattgttgccgctactcctgcaacacttgtccataaaatatagagctttttatttcgcctgtccagatgttttcgatgaaaatcagctaaagcctgctgtgtattaatagaaagtgtatttttttccatttgcattcctattacagcttctgcaatatcactgcaggtctgaaagcattcttcattctctcttaatgcctgcaattgatcggaagtaatatcagaaacattttccattatttccaaagcttccttttccgacttatttatatatgtattattttcatccatagattattcattagatatataatatacgttttaaaattcattttggttacctttttggcctaattcttcacgaagaatacgcaaagcttttactatattcttatgaatagcagccacgcttacattgagttcctcggccacttccttatattttttgttatggatgtaacatgcttccaaaatgtaataattatacggagtcagctttttcatggctttacgaatacataaaatacgggaatccggttgttgtgaatccgattcttttattttattgattaattgcgaagtaaattcgacatattcttcatggatattttgtttacgaaggtaatcaatgcaacgtgtacgaattattgtatacaaataagttttcgctgtaacttcttctattttatcataattacgccacaaatattcaaaagcatcacttacgatatcccggcagacttcgacatcatttacaaaatagtatgcaaaatatacaaattgtgcataccactcattaaacattctgtcaaaagcagctttatcatccatttattctcgtattcttttattattttctggcagacaaatatacattaaaacttgatacgtagttgcatttgtatatctgcttttttatttccatagattaaatcgttgccggaacctatttcattccggttcagatagatagtttctccgaacttggttataaacaaccagtgtttattcaattcatatctcaaccggacagcacaacgaaatccgcgaccttgaaaggaaggagtataaaatgtatagagcaatcctttttctgatacatacacacgggagtcataatcgtccgtacaaaaataactgccttgaacgtcagcaaacagcctggtccaaggcagttgggaggatatcatctgtgtaacctgatatcctttagtagcagctctgtcctgagaatgaaaatgattataatctaaagttgtacgactgctaaacacatcattcaaagaatagttcaaacgataacgaagttgatgatgaaaaataggaagcgttagtgttcctttactgcctgtcaagtcacgttctttctgcttataacgatatttcagatacattgataaattagtacgcggagtaaaagttgcctgaatcaatccgtccgttccacgggaaggtttattaattctgtatttcttccagggaaaagaaaacagatcgaatgaaacaaaaaacctccaatggctgaaaggtgttgtttctaatccaacataatatccctgttcattttgaaccgtacttccttcaccgaaagaatgagcatacatagcccaataatcatacgaataaaaacgatgtatcaacataaactgtatgtcttgaaccggcgagtattgtaatcggttcaaagaagcccaaccttgttttcctatcgccgtttctccctgaaaagagaagcgacgccaacgataggcataatctatccctaaattatagaaatgatttccatgaatattatacttggaataacctgttagttccggttcataaggtcggttgaaaacatagtaaacaccggtgatacccaatcggatatggttctgttgataactaacatttccgcctgttaactgtgatgtgagcaagttctttttatccgcttctttgcgacttctatgtaatccggttttatatacagatgttatttctccgtccgtaacaacaccatccatattccgatgtgaatagaatgcagaaaccgataaacgttttgtcaaagcaacagtagttgccaccccacgaaaataattatattcatccgtagaagaatgccttttgattccagtgctgcgattgttgaaagaggatgcatatattgtttttcccattagataatccgtactcatcactaagccttgcccgaaactaagccgatagttaccaacagccaataatttcaaccgaccacaattctgaagtaataaataaaatgagtaataatcatatccgtagcgattatgcaaagcagcaaaaggttctccggcatctttttcggcaactccccctgcataaagctggtcacgatatcgaaatgtatatttcacagagttataaacagaaggtcccaaataggtatgttcataaccttttcgtttataaaatggtatatccaagcgagttaacacttcattcttaccataccttcctgcatctttcaacatagttttccaccgaaaagcaggctcattgttaatagcttttatacagacaaaaggcaataaatactgaatagtctgcctgtccagttcctctaccaactgaagttcgtaaatggtttccatttgcccatgtatataaatataagccaataaatgctcaatctgaatatcacttaaaaaaggaaattgttcgagttgttcacgggtagcactatttaaattaacaggctcctgcagacggttggaaagctcttccaattcattttcccaattcagggaattaaccgagttattaatatcattattaacagataaatcttcaagaacttcttccataagattttctgaagggttttgagcactacaagcaggaattatgaacaggctgtttataatacttatcaaccgtaatagttgagtagttttcatcaataaaatgtgtattttcttcttgccttttcacagacaagagcgcaaagatactttaaataggttaacgctctaagaaaatatctgaataataaaattttaattctatttttgtaatgtgaaaaggagacttaacatagtaataatgacgttgtttgctgttttttactgttcactgcatctgcaggctcaggaaaaacaaagcattaatggatacttggttccgatgtgtatctataatggagatacgattccatgtgtccaactaagaactgtgtatatcttccgaccactgaaattcaaaaatgaaaaagaacgcagagagtattacaaacttgttcgtaacgtgaaaaaagtatatcctatttctaaggaaatcaaccaggccattatcgaaacttacgaatatctgcaaacattaccaaacgagaaagcccgtcagaaacacattaaacgggtggaaaagggattaaaagaccagtataccgcccgaatgaagaaactttcttttgctcaaggaaagttgttgataaagttagtggaccgtcaaagtaatcagaccagttatgaactggtaaaagcatttatgggacctttcaaagccggattctatcaggcatttgctgcactgtttggcgccagcctcaaaaaagaatacgatccggaaggtgaagacaaactaacggaacgtgtagtattgctggtagagaacggacaaatctaaattacgtgtctgatgcttattaaccaactttattaaccgaaagttagtaaagctattactttcttctacaacattatccttgatttaccaacatcgatttcgtttttacaagacatatataagctatttgcagggcatatatacccaatgtggtgtatatatatatccaccatgctgggcatatatgtccaatacgctggatatatatgcccagtaaacaggatatatccctcctataaagagtacaatgacataacttggattctatacttatgaacaattatatatatattgattataagcgaattaactatattattaactagttataaaccacttattaactaataaggttttaagctgtcaacgaagttttttgaataaatcccagatcacaattcctgtcgttacagaaacattcaatgagtgtttcgtaccatattgaggtatttcgatacaaccgtccgaatggttaataacctcctgctgcacacctttcacctcatttcccattacgatagcgtatttcttacttttatccaattccagttcatcaagcatgatacttccttccgcctgttctaccgaatagaccatataaccagcttttcgaaggttatcaacagcatcaacagcgttatcaacatacttccagtcgacagtgaattcagcccccaatgctgtcttatgcatttcgggatgtggaggagttgccgttataccacacaaataaatacattcaatacgaaaagcatccgaagtacggaacaccgaacctatattgtgcagactacgaatatcatccaacactaccaccagaggcagtttctcagcctgtttaaactcttcggcactgatacggttcagctctgttattttcagtttgcgcatacgtcttttcttttattacattctgattgcaaaggtaactcttttctgttaacacagatgttgataacagtttaaaacctgtcaaaactatcggcaaagattttgaaaaataattcttgcattattcaaaagaaggtataagaggacttcattatgaacattccaaaaaattaaatcaaaactttctatgcagacataaacatatttttcagcacttatctacctgtttatatccataaagtttttaactttgcactttatcaacagggagttaatagataacttccattgaccgatgcttgcattgataataaagcagatatacagtaaatcttcttcttttttcccgttcataacggacttataaagcagaagtatggactaataacttatccggcaagaaaaaacggatttatttgctaacattattaacaggcaatcatcactaacaaaggatttttttaaaaaaggaagaaataagaatattattatgaatgaactcataaaggctattaatgagctgaagaaagaaaagaatgcgatcattctgggccactactaccagaagggtgaaatacaagacatcgctgattacgttggtgacagtttggcattggctcaatgggcggccaaaacggaagcggacatcattgtgatgtgcggcgttcactttatgggtgaaacagcgaaggtgctttgtccgaacaagaaagtgctggtgcccgacatggaagcaggttgttcgttggcggacagttgtccggcggacaagtttgcgcagtttgtcaaagagtacccgggacacaccgttatttcgtacgtcaacacaacggctgcggtaaaagcggtaacggatgtggtggtaacttccaccaatgcacggcagattgtggaaagcttcccaaaagatgagaaaataatttttggtccggaccggaatctgggtaattatatcaactcagttacgaacaggaatatgcttctttgggacggagcctgccatgtacacgaacaattttcggttgaaaagatcgtggaactgaaagcacaacatccggaagcattggtactggcacatcccgaatgtaagagtacggtgctgaaactggcggacgtggtaggttctacggctgcattgctgaagtacgctgtgaatcatcccgaaaacacatatatcgtagctaccgaatcgggcattctgcatgagatgcagaagaaatgtccgcagacaacgtttattccggctcctcctaatgatagtacgtgcggatgtaatgagtgtagctttatgcggttgaatacgttagagaagctgtatgagtgtctgaagaatgaatcgccggaaattacggtggatcctgaagtagcagaaaaggcagtgaagccgattcaacgaatgttggagatttcggcaaagttggaattataagaaattatttcggtttacttactggatatctttgaaagaaatatctaaaaagaaaaggagaaacttattgttgtcaagtttctccttttctttttagtgttaatatattgcgaaagactttatgaccggattatctttagcttcttctatttccaactttacaacagataaggagtgagttggaaaatgttcgatccgtttatgaccgatacaacttccttcagaaagttgtatccattttccattacacagaccttttagtttatatttcagaactctttctccaaatgctatatcttctgacaatacgatacggcttatattggtctctttgtttaaccggatagatagttcgtatcctttgcctgatatttttcggataggttttgaaaatgtttttcgtataatgtcaccgaattctttcgctctttttacatcagcatcaggaaccaagccgttcttatctattactaaaccaagcagcatattggtattacgtcctacactggtttcatatttaagtaaaagctcatcagtagaaaatatcagatgatcttcattagcgcgccaaaaccaaccaccttggaatgagtcattacggcgtagtgtgaaatcagcttctccgggacaccagtagtttccgtgtggattaccgtataagccttttatcttctgtacgccatcggcggaagttgttgcatcggctgttgcccaacagggataaggagagttaccttcttcattgcctacccagcggattaaattcggatatccataagggccttgaaatgcaatggaattgggctgtaaacgttgaataagtgtcaatatatcagctcctccattttgctgagagagtacgccgccatcaaaccatatttcaaacagttttccgtaattactccaaagttcggtcaattgtgtctctactattttgttatattcttcttgggtgaccggacttcctttcttgacaagtccagggttgtcgacatgtagaaaaccattagcggtagtactggcatagattcctggtttaattccgtattttcggcaagaagcgacaaattcggctacaatgtctccctttccatttttgtaaggtgaattttttatactgtattcatgagcctttgttggccataatgaaaaaccgctgcaatgtttggctactaacactgcatatttggctccaaggcttttggctgtgtgtatccattgatcggtatcaagggaagaaggattaaatgtagatggtgaaggatgggtaccaaattgtcgccaattatagtcggggtggaataccggcatatcaaagtgaatgataactcctatttcggcatttgcccattcttgttgtaattcattcggacatacaattattttctcttgggcatcgagaaaaggactggtaaatgtcagaatagcaaagattatgcattgaatgaatgttttcattgtataatgatttagtatatacatacttgtgttatgatatagcaaagataagagatattaaattttaaagcaaattcttttattaatcttcgatattaagaagaagagtttgatgaattaatcagcacattcaagatttctatatttgattaaatttagtatatgaaatgatattcaattctttctttgcatttcagtatctttttttctacctttgcttatgggttaataaatggatagagaaatacttaataggcatttgaatgagataaactaagtatgaacatcaaataaaattaagtaatgaaaaatattaatatttcatgggccgtatttatagtaggtatattcttctccttaaataatatttttgctcaaagtagtcctccgcttatcgtgtttggtttgattgcagatacacaatatgctgactgtgaatctggaaaaactcgattttatcgaaactctttaggtaaattacatgaaagtattgattattttaataatcaaaaggtacagtttacagttaatttgggtgatatcattgatagagatcaaaaagatttagattcagtattaatatgtctgaaacatttaaataaaaaaatattccatactactggaaatcatgattataaaggtattacagataataaagtattatataagaagcttaaaatgccttcagaatactattcatttatgaaaaagaactgggtgtttgtatttctgaatacaaacgaaatagcagcttattcaaatgttgtcggaacagcaaaagagcaggaacttttgagaatacagaatcagattaaagtaaataaagaaattcaaggcgctaggtggaatggaggcgtaagcagccggcaattgcagtggctggacaaccttttgaagaaaagtgaaaagaaaaatagaaacgtattgattttctgtcatcacccgttatatcccagaagtcaatttactgcattaaataatatggaaatattagatgttattaatcgctataattgcgtaaaagctatattttccggccatcatcattcgggagcttttggatacttcgatcatattccatgtaatactgtagaaggtatgattgaaactccggataaaaattcattcggcattgttagaatatacaaagaccgaattgaattggaaggaaaagagcgaatgacttctcgacttttcatgcttcaaccataggaaaatacttcatcacattacagtatttgtagctaggggcacaactttaataaggtgttccttttattttttcttagtctatccggttacgtttaacacttaaattatagttggaggaaaaatgtgcttttactagtaattgtatttataatcaggtagttatatcggatgttgttcggtttatataaattgtccgggtataatataaatcgtccgtatacaatttgtgcagttataaaggaaaattctagcagatataatttaaaataaaacgcgtcctttgaagcgaaaagttaaacaacaataaaatctattacgtatgaaaagacattcaacaattcgcttaccatcaaatagtaagattctatctaagtatttaacatgacaagtattctgttattaacctttatttattattaactactaaaaaattaaaagtgtatgaaaagacgagtcagttctatgaaaataccttgtagaatatggctattggcagccacattgtctgtagggcaagcggctttttcaacggaaatggaaactatttccttttcgacgggccaagatatagcacaacaaaagaaggtaattgaagttactggtactgttactgataattttggtcctgtgattggggcaactgttacagtaaaaggcatgagtgcaggagtaattaccgatacagacggtaattttaagctgaaagttccggtaggagctactattatggtttcttatattggatcactactgtcccgtaaaagtggataattagttctttgaaattattgaaatatagtcaattacgcggttttttaaaatgaaacggacttgattttgcaactttgcagtctaatacaaatggctgctatgttccaagacaaatacgtattctctcaattaaccgcttttctgaacaggactcagttcaacaactatgttcgcaagtatgatggcaacagatatgtgaaacatttcacttgctggaatcagatgctcgcgatgatgtttggacaactgagtaaccgtgaaagcctgcgagacttaatcgttgctttcgaggcgcatagggccaagcaatatcatcttggtttaggtcgtgaaccgatagccaaaacaactcttgcgacagccaaccagaaccgtgattacagaatcttcgaagactttgcattctatatgatgaaggaagcctgcgagaagcggacgaccaacatccttgacatttccggaaagaaatatgcgtttgattcaacaacgattccgttgtgtcttgcaacattcccatgggcaaagttccgaagcaagaaaggaggggtgaaagctcatgtcttatacgacattgaagcacaagttcctgctttctataccgtaaccactgcttcaaagcatgattccacagcaatgtcttcaatccattatgaaccaaatgcttattatatattcgacagggcttatgactcctttaaagaactctataggatacatcttacagactctttctttgttgtcagagccaagacaaacttaaagtataagacagtcaaatggaagcgaagaatgccaaagaacataatgacagatgcggaagtgaaactgaccggatatctctccgagaaaaaatatcctgagtcattcagactcgtccgatattacgacgaagaggatgaccgtgagttcactttcttgacgaatgcaaaacaactttctgcactggatgtcgccaatctttataagaaaagatggttaatcgagctgttcttcaaatggctcaagcagcatctcaagataaagaaattctggggcacaacagagaacgctgttcgcatacaaatcagtgtggctattatcacgtactgtcttgtggctattgtccaacatgatatgaagttgaaacgttcaacctatgaagttttgcaaattctcagcatatcattgactgacaaaacccacttgcgtgacctgttcgacaagactaatttcaatgatgtcaaagatctaaatgatcccctgattccggggctttttgattaattgtttaactcgtcccattttaacgggacactaatgatattggatatgaaaataaagaaatccattataaaggagaaagaagtctgaaaattaaattgaatgagaatgttcaggaacttgaggaggtacaaattatcgcttacggttctcaaaagaaagtaactgtgactggtgctctttcttctattaataatgaagaactattaaaatctccagttgcaagtatggctaatgctttgaccggtaaggtcacaggtttggccagtgtgcaatctagtggacagcctggtgccgatgatgcaactttgtatgtgcgtggtgtcggttctttaagtactgacttatctcagcctttgatgttggtggacggtgtagaacgttccttctttcaattagatccgaatgaagtcgaaagtataacagtattgaaagatgcttctgctactgccgtatttggtgtacgaggtgcaaatggtgttattctggttacaaccaaacgtggtacatcgggaaaagcaaaagtaaatttttcaactacttatgcttggcaaatgccttcaagagtaccggaatttgcagatagctatggttatgcaaatgcttataataatgctcaactacatgatggtgtctcagaggatcaactagctttttcttctgatataattgagaaattccgtaccaatagtgatcctcttgtgtatccaaatactgattggacagatatgttgattaagaaatcagctttacaaacacaacataattttaatatatcaggaggttcggaaagagttaagtattttgcttcattaggagtgtttactcaagatggactctttaaaacatttgaagaaaacggtaatgataaaggatttaagtataatcgttataactaccgtattaatatggatattaatgtaacctcgacaacctctatgcagattaatttaggaggttatcttaatgataaacaagaaccaaattacaataatggtacttacacgcagttaaaatacttatttcgggatatttataccgctgttccttttgctggtgcaggtattgtagatggtaaatgggtagtatcggatactgatcttttttctattggtaattattatgatgcattaaatacttattatgggaaaggatataataaccgtactcaaaacacattaaactttgattttcagttagatcaaaaattggattttttaactaaagggttaaaggtacatgtgaaaggagcatacaacagtggtgtaactatcacaaagcgtcgggaagggcgtgccaataagtatgaagcgatttataatacaaataatgagctgatatataaaaagagtcaggattaccaaaagctgggatattctgaaagtacaggtcaaacaagaaactggtatttagaggctgctgtaaactataagcgtgattttggaaatcatcacgtgtctgcactagctatgtataatcaatctatgacttattatccttatgaaggtagtagtccatcagaatttattggtattccaagaagttatgttggtttggtaggacgtgcaacttatgattataaaactaaatatttgctagatttaagtttaggttataatggttctgaaaactttgcagagggacaacgatttggtcttttccctgctggatcattgggatggattatttcagaagagaatttctttcagccaataaagaaggtaattaattactttaaaattcgtggttcttatggtattgtaggaaatgatcgtgttagtgattattcccgttttctatatttacctgataaatatttgattagctcaggaagttataattttggtataaatacttcaactaatattgccggagcggtagaatctaagaaagggaatcctaatgtcacatgggaaacagcggctaagcaaaactatggtgttgatatgaagtttctcaaagatcgattgagtttaaactttgactattttgttgaacatcgtaaaaatatattaaaggcacgaactgtaactcccgattacttggcagttagcttgcctattgcaaatattggtaaagttgataataagggttatgaaatcaatctaaagtgggaagatcgtatcaatgaggtgcgttataacatcggagctaatctttcctacgctaagaataaggttgtatttatcgatgagattacatacccctatgaatggatgcaaactgaaggaaaacctgtcggtcagcaatttggctatgtttttgatggatattttacagaagaagaagctgccaattatgagaatctgaaaggaaatattgaaggagggattcctgatcaaggttctggttatgtacctttagctggtgatgtaaaatacaaagatttgaataaagatggaaaaattgatgaaaaagatgtaagagatatcggttatccgaaatatcctctttatacagctggtatgaatttaggcgtctcttggaaaggatttgattttagtatgacttggtctgccgcattcaaaacttctcgtcttttgagttctatgtatcgggtaccgtttggtgaaagtaataattcagctgtcatgaaatacatgattgaagatgcctggacaccagagaaaggaaattctgctaaagcacctgcgctttcctttaagagtaaatcacacaattatcaggattctgatttgtggttgagagatgcatcttacgtacgcttgaaaaatatagagcttggttattcatttccttcttcattaatgaaaaaggcgcacattggttcacttcggctctttgtttcaggttacaatctgctgactttcgacaaattgaaagtaagtgatccggaagctaatccggatggaacagcctatccgcttatcaaagtcgtaaatgtaggattaaaagttggtttctaatttaataatgtagaatcatgaggtcattaagaaaattattatatacaacccttttgatgggtactttgtttgtcggggtttcctgcgaagacttggctttcggagacaagttcttgcaaaagccacctagttcagatgtaacgattgatactattttttccacttcagaatacgcccgtcgtatcttgtggaagagttatcaatatcttccttatggaatggaaacttcaggttattggacgcaaatgtggttggggactcttgaaggtttgacagatttgaactatgataacgtaggttattctggattagctaaagtttattatccgggtaattataatgcttctatagaagatagaaaaagttcatatcctacgggacagagaactaaatgtcgttttaacgatgctgattcgcatatgtggacaggtatccgtcacgcttggcttctttatgaaaatgttgatcgtgtacctgatatggatgcaactgaaaaatctcgcctgaaagcggaagctaaaatgatagttgctatttattattctcatatgttgcgtcactttggtgctttgcctattgtagatcacgctattgaccctgaagatgtgaatctaccagggagggccactttacaagctacggtagattttatcataggtttgcttaacgatgctattaactgtcctgattttccatggagaatatcagataatgatttggcaaactgggatggtcgcatgacaaaagctggagctatggcccttaaggcacgtgttttactgtttgtagccagtccattattcaatgataatgctccctactgtgatggagaagcttcatctagtttgatgacttggtttggtggatataataaagaacgttggaaagatgctattaatgcttgtgaagagtttttcactgcattgaatcaaaatggttattataagttagtagaagttggtgataatggtacatctgatgttcgtggggcatatactagtgcatattatgatcgtgggacaacagaaactttaatttctgttagaagaaatatattaaatgccaacgctaattcgatattaagcaattctattcgttggggaggttattgtcctactaaagaatactttgatatgttccagatgagcgatggtactgattttagttgggataatcctgaacaagctaagaatccatttttgaatcgtgatcctcgtttatatgaaacatttattttggatggagacaaatacaatggtagaacagctgcattgacagaagcattggctagtgatcctgtaaattatccacagggagcagactgggcacaaggtggaagcacgcatgtattgagtttgggtacgggactggcatgccgtaaatggggtttggatcggaatacggaatggaaaaaccgtcctatacaatggccgttcctgcgcttagcagaaatttatcttagttatgcagaagcgttgaatgagtataatggttctcccaatgcgcaagcatacgatgctgttgataaagtacgtgctcgtgtaaacttgcctggacttaaaaaaggattggggcaaaaagaatttcgtgaagctttattgcgtgaacgtgcttgtgagttcggttacgaagaagttcgtttctttgatttgattcgttggaagctttataatgtttttgagaagcagttacatggtttgcatgtatataaacataaagatacaggcgaatataaatttgttccatatgaattgaccaaatatccgcgtgtatggtggactagcggtttcgaacctagatggtgcttgagtgcttttccttcagtagaaatcaataaaggatatggccttgttcagaatccgggttgggaataattaattaatgatattaacagaaaatagaaataacaatatactcatgagaaaaagtatcaagttattagtagcgtgtatgttgtgttctccggtagctattgtagctcaggaacaggacagcttgtttgcacgcaaaagtaaagtggctatagagtatggacgcggcatttctttcaatctgaaagaatcgactacggcaactgcagtagcaagtgaggaggaactttcgcataagaaaagcatcaataactctaatatgctttatggcttgattcccggattgcaagtgttgcaaaattccggtaatgcctgggatgacgctgcaacattgagagtacgcggatatggaaccagcagttctactgctccattagtgttggtagacggttttgaacgttcactggatcaaataagtgctgatgaaatagagtctgtcactgttttaaaagatgcagcttctacggctctttacggaatgaaaggtgccaatggtgttatcttggtgaaaacgaaacgtggaaggatgggtaagccggagattaatttctcttatcaattcaatatggctaccccacaacgtctgccggaatttgttgatggatatacttatgccaaagctttgaatgaaggattgaccaacgatggattgtcggcacgttattcggctaaagaactggaagctttcagaactcaaagtaatccggatgtatatccgaatgtagattggtgggacgaagcattacgagatcatagctatggaaacaatgtaaccttctcggcaagaggtggtggagaatttgtacgttatttcactcagttgaattatttgaatgataatggtatattggaaccgacaagtgataatgacggttactccactcagttcaaatactcaaaactgaatattcgtaccaatttggatattactgtcagtcctacaactaccgtacagctgaacctgtttggaaatttctccgaacataaccgtccgggagaaacgacatcgaacattttcagtgcattgtatcaagttccttctggagcatttcctgtaaaaacgtctcgcaatgtatggggtggtacaactgtatattccaacaatccgattgcaagtatttccggtagaggctatgctcgctctcaaacccgtaatatgtatgctgatatgaaattgaatcaagatttgagtgctcttgtgaaaggattatcagtaggctttcaggtaggtttggacaacagtgcttcttattgggacaacaataccatgaacttcggatatgaacaagcaacgatgaattgggaaaccggagaaactacttataatactttacgtaatgaaggtactctttcattcagtaagagtgtaggatcttcggtcaatcatttcaattttggggcctatgccaactatgctaaggactggaataagcatagtctggttgcaactctgcaatacaatatggataaaacaaatgccaaaggtcagaacaactcgaaggcatttatggatgtagtggcacaggcccattatgtatatgaccatcgttatgtactggacgcatctttatccggttctgccgccagcattctggaaccgggacatagatggggaatctttccgtcggtaggtgccgcatggattatgtcggaagaagctgccttgaaaagcgactggttaaacctgttgaaacttcgtgcttcctacggtatttccggacgtgctgattatggtactgacctttatcttgatgtgtatggtacagggggaagttattatttcggaaaaaatccggcaagcatcagtggtatgaaaattactcaactgggtatcactgacatgacctatgagaagtctcacaaattgaatgtaggattcgatttcatagctttcaacaagttatctgttactattgacggtttttacgatcaccgcacggatattttagtaagcggagataatgccgtgtcttctatatttggtttgacagctcccaatatcaataatggagttgtgaatagttatggagtagaaacaagcgtacgctgggcggataaaatcggtgattttaattatcaaattggcggtatgctgactttcaaccgtaacaagattattaaccagaacgaagaatatcgccctcatgactacttgaaacgtacaggcaagcgtttgggacagttcttcggttatgaagtggaaggtatttaccagagtcaggaagagattgataaccgcggtgttaaacaaaacctttcagatgttcgtccgggtgatttgaagtataaagaccagaacaatgacggagttgttgacgcttatgaccaggtagctttaggatacagtgctatgccggaaatctattactcattcgacttgaatctggaatataaaggtttcggtatctatgctttgttccaaggaacgggaaatcagagccgtcttttgaacacttcaagtgtgtattggcctttgattagtaacagtactatttccaccgaatattataacaatcgttggactccggatactccgaatgctaaatatccgcgtctgacttcagaaggttccgccaataactatacgactaactccttgtgggtggctgatgcgtcttatatgaaattgcgtacattggaactttattataatttctcacaggaaatgatgaagaagagtaaattcatcaaaggtgccaaagtctttgcgcgcggtcacgaccttttctgtgtagataagattaaagtattagatcctgaaaatatcggaacaaatcatccgaccatgactcagtatacttttggtgttaacttatcattctaaaaagtaaaatgaacatgaagtattttaaaatcaaacatattgccttgttgcttgcggttacatccgctcctctgtacacagcttgtgattttatggattgcagcgaaacagattattattcaaagcaacaaattctggataacatggaccgtgtgaaacaactggctacacaggtatatagttatttgccgcatgacttctgtaatacatcgggagctatgcaagacgcagctacggatgatgctatccatgtttacgaatcatctgctatccaacgttttgtcaatggtacgtggtcagccaattatacggtcaatgacgtattcggtacttactacaacgctattcatgatgctaacttctatcttgagaactgtgtcggactgacgttcgatgaatggaaatattccgacggttttgctgatgattataaaagttacctgaattatgagcatgaagttcgctttctgcgtgcattctattactttgagttggtgaaacgttatcagaatatacctctgataacgaagacactgacacaggaagaagccaacgaagcagaaccttcggatgcagttactatcctgaacttcatcatcagtgaatgtactgatctggctaatgacaaattgcctgttaattataacaatatgcctggtggagaaggtaacttgcaacgtgctactaaaggtatggctcttgcattgaagtctcgtgcatctctgtatcttgccagccctttgtattctgccgatgatacgcagaaatggaaaaatgccgctcaggcagcatacgatcttatcagtcaggccggtactttaggatatagtctggacccgaaatattctaatttgtacggtgctaccaataaccaaagtaaagaagtcatcatgtgccgtcccacgggagcaagtacaagttttgagtctgcaaactttccgatgggagttactaaaggctctactaccacttgtccgacagaaaacttggtaagtgcttatgaaatgacagatggtacagcttttgactggagtaatgcagaaatggctaaagacccgtatgcgaatcgtgacccgcgtctgggaatgaccgtagtatataatggtatggcatggcctaaaacgaccccggtagaagtgtttgaaggaggtaagaacggtcagcctataaaaaatgccacgactaccggatattacttgagaaaatatgtgaataacagtgtcacttttgaaccgggtgaaactactaccagccagcagcataactggatcttgttccgttatgcagaaattctgttgaactatgcagaagcaatggtaaatgcttatggtgatcctgactacacaggttcttatagcctgagtgcacgcgatgcagttaaccaagtacgtaatcgtggagatgtgaaaatgccggcgtatcctgccgacatgagtaaagatgcctttttgaaacgattgaaaaacgaacgccgtgtagaatttgcattcgagggacaacgtttctgggatcttcgtcgctggaaagaattagatgatatgcagaatatttataaagtgaaagtagttaagcaaactgacggtactattcaatatacgaaagctttgcatgccacttacaatattcaggataaaatgtatttctatccgatttcgaataccgaacttttcaaaaaccataaactggtacagaacacagggtggtaaatttggaatgagataacgagtatataccgatgagggtgtcagttcattcgaggaaaggcaccctcattatatttaaaacatgaatttccggcattaactaaaatctaaggtaaattatgaaatatagctacaatgtatttttcattatattatggggactttttatatcctgttcaagcgatgatcctgcggttgattctaacgaagggaaagatgataaagaagatcctcttcccgataaaggaactttattcgccgactttgaaacgtatgatacaaccccctatttctttcgttatggcaattcaggcagtagtaagatagacgattattatccgcgttgggcatattcccatatagtgatagataatccggttcaaagtgaagaaaacacttcctccaaagtgctggaatatacttcgatggaagcccggaattacggtttgaaattccgtttttccgaaacagtagatattgatgaactaagaggaatccgtttccgaatttatcaacctgccaatgtgataggaaaagaaacgtggaagggtacttccaaagcagtatctcaacaattaggagttaaactgataggaaggtttaattcggtgaatgattacgagcaggaagaaggagttatattaaccaattcgttggttgatttcaaagaagaaggagcatggaaaacatatacgtttgcttttagtaaaagagaatacagtgctgccgctacacagttgaagaatggtatagcaggtatagtcattctgccgacgtatagttcgggagtcactttggccgagggaaataagtataaatgttacatagatgatattgaaattttataagaacggaaggagaggaaaaggatgaaaggaaaatgttttctaatatgtatgttattatgggggatgtcttgtgtaaaggctcaaacctcggacgtggataaaatgtttccgaatgtcgtgctcacacgtgaaaactatgataaagtgaaaacagcattggagaaggctgataataccgcttttccgatgaattggtatatcaaacagatagaaactcccgctaaaaatattgtagagagtaaccggaaaacgactccggttaaatctattgatgaaaatccggataagatagacattagtaatgaaatgaaagctattcatcaattatgtctcgcgtatgcttttacacaggataggacgtatctgaataaagcggttgaatatctgaaagcatggtctgaaatcaatgttgccttgtcgaaaagaaatattcatgaagaatcatataatattgctgtcgaaggttattcgttgattcgtaaagtaatcggccagtctgaccgggaattgattgatacctggctacgtaagagggcggaggtatttattaaagataatgacttgagggtcaataactggggtacttgtctgttatatcaattttatctgttcggcacggtattggaagatgaggctatagtcgataaattccgttcctcatatgacgattgggtgaagggtaacctgtttcctaacggaacgactacggatttactcggtcgtgatgcttttgcttatcatgcttatgatttattgttcttcgctcgtctttgtcatttgaaggcgatgtatgaaggttatgaagctgctgaagctttctataagaaggatgtacattggggagcttctatccggaatagtgtggttttctggaaaccttttctgttggattccaagaaatatactcaccttgaatttgtaggtacagaatatgaacccgataagaaacgttcggattacaataaagcttacaatccttcgggaactttatatgtgatcgatgaattgtacgaaatagataaggaacttaaagaggtattagattattataaacgtaatccggatgtttctttgaaattgggattaagttctttacgttggcattaatggttgtataaaataagttttgtatgaaaagaatttttatagtaattgttcttttgacagttatatccaattattctatggctactaccgaagacaatttgcattggttcaaagatgcaaaattcggtttgtttatacattggggattatattctcagacagccggtgaatggaaaggccatccaaccgaaggtggcgaacactttatgctttatgagcgtattccgttaaaagaatatgcaacaatagccaaagattttaatccggtaaaatttgatgcgaagaaatgggtacgggctgccaagcacgcaggaatgaaatatttggtatatacgactaaacatcatgacggatttgccatgtataattcagcttgcagtgattataacatagtgaagtgtactccttttgccaaagatcctttaaaagaactggcggaagtttgcaaaaaagagggaatcaagctgggactttattattcattaggacgtgattgggaagatccggatgttcctactaactggcctgtaaaagcaggccgcagcaatacttgggattatccggatgaagatagcaagcagttaccggcttatattgaacgcaaagtaaaaccacaattaaaagagttacttacgaattacggtgaaatagcagttatctggttcgatacgcctgaactggttaccaggcaacagagtaaggaattacgtgaattgattcattcgttgcaaccggggtgtttaatcaatagtcgcattgggaacggattaggagactattcaattatcgaacagaaactttctaacagcataaataacaaaccttgggaggcttgcctgacgatgggtaagaactgggggtacaatcgttatgatactgtttataaaaagccggatatattaatcagaaattttgtagacattgtcagtaaaggtggaaatttattgttgaatgtgggaccagaccaagcaggatgttttccggagcaaacggatataatattgaaaacttttcataagtggctgaagagtaatggcgaggctatttatggaacaactccctggcgtatctttggagaagattttacggtaaatagagtagaagatactgaacagaaaccttttcacgatgcagtatatgatggaactcctaaagatattgtacctgatgtccgcttcaccatgagaggtaaaagtgtatatattatcgtacgtcatgttactaaagcttcttatacattgcgttccttttcttcggaaaaggataaaatcaggaaagttacattattggagaatcataagaaggtagactgggaattggatgatgacgggttaaaaataagtaatatacatcgttctactaaagactcttttcctgtttatgtgctaaaagtagaatatttctgatacttataaaattgagagtaaaggttgtgaatttctataaaatttgcaaccttttttattatatctgacataagtgaagaaaacctttgttagaatcgtaaaggcaggattatagattgattcgcctataaaaatgttgtttatgtccagtattttttcgaatattgcaaattgttagtatatttaagcgattaatttgtgattaacagaacaacaccaaataaaaaataatatgaagttacgtcatttattactgttgtttatttcttttttctttgttttgccattatatgctgaatatttcaaacatattggtttgtcggaaggtttaacacagccctctgtgatggctatttatcaggataggttgggcagaatgtggtttggaacaaaggaaggaataagccaatatgatggaaaccgtgtaagaatattcaaaggctggataaaatctgtaggtgaagaaccaccggtctggttgggcaatgaagtttcgtttatcgttggtgacagcttggataatctatatttcttaattgataagaatttaatcaaatatgacatacaaacagagaaattctcccgactcacgaatgaaagtattatcaccgcgcttacttcgtccgaaggacaagtgtggtatatgaaacatgattctttattttgtttgaaagcagataaagaaccaacttttgtattaaaaacgaatatcacttcacgtatttgttgcctgaccatgatggacgatcagattggtatcgggacatataacggagtttatctgattgatcgccgtacatatcagcaaaagcaactattggaaggggtggagatttatcgcatatttgaaagttctcaaaaagagctatggattggtacccgcatgcatggattatatcgaatgaacgacaaacaacaattgtcgaaagttccttatttgccgggaacttcggaaggtatcagtagcgaacagattcgtgattttgtagaagataacgagggaaatatatggttcggtacttttgacggacttcatcgctacagtattggtaacaaacagtattctctcattcaaattccccaatatgtgggcgggctgaatcatccctctatctttgcattgtataaagatgttgccggaactatctgggtaggtagttactatggaggagttaattatttcagccctcaacatgatacttttgtacattatgactatgggagaaagataaactcatattattcttatatcggagaaattgttattgataagaatgagcatttatggcttagtacagatgggggcggtatcacttgtgtagataagaaatggaatactcttcagcagtttacagccggtggaaaaaactctatttctcataataatgtgaaaagtatttgttatgatgaaaagaagaattgtctgtatataggaacctatttgggtggtttgtcacgttatgacttgaatacaggtcgtttttataattattggaaagaagagagtcactcttccgatatgcctgatgaaattgtttatcatgtgaagatatggaaagatcaaatatatatatctgcccataatggcttttttcggttggatactcagacacagaaattccataggatcaacattccttttgcattttatgagcatttcgatattgatgcggaaggtaatttgtatatggtgggttggaaaaatgttttgtgtactcatgtagaacatcccgagtctatagtctatgttccattggcagaaggagatagtaaagcaactcctacccgtgtgcttgccacctccgatggtgtctatatcggtacgttaggaatggggctctttttttatgataggcagacgcgtaacatggctcattatacttcccgaaacaatcagttgccgggtgatttctgctataatctttgccggacccaggatggaaagattctgataacaggtgataagggagtcacctgctttgttccttccgagggcactttcacaacgattgatttgatgagaaactttccctcgactcatattatcaacggatgtggaattttggtatccggagagggaagtatttacattggagatacaaaaggagtaaccgtattctcagaaaatgagtttaacaaaaccggtactgctaatgagaattctaacttttacttttcagaactttgggtcgataataagacgattattccgggagatgatacagggatattgtctcagtcgctcccgtacactcgtgaacttaaacttaattatgatcagaataatctgattattcattttgctttgtccgattacggacaacaattatcggaaaaatggtttcaatataagcttgaaggtttggacaagaattggattaagactaaacagacggaattgtattacactaatctggatccgggaaaatatacgttgcatgtggcttcgataaatgaaaagagcgggcaaagtttggaggaaataacgatgcagcttgtcattgcctctccgtggtatgatacgtggtgggcatggataatctatgtgacagctttcattgcgtgcgttttctattatgtatatagtaaaatagcaaaacgcacattggctctttctttggaaaaggaacgttttgagaaacaacagataaagcagcttaaccaggaaaaactagttttctttacaaatgtgagccatgagttccgaacacctctaactctgattatcagtcatattgatatcctattacaaaaatattcattgaatccttctatatacaatcagataacgaagattaggaaaaatgcgcaacaaatgaataagttgatctctgagttgcttgaattcaggaaattggaacagaattatggaacgatacaaataaagcaacaggatataattgtatttttgaaggaaatctatctttcttttgtcgattatgcacagcaaaggaatataaattatgaattcaaattaccggaattgtctgtcttatgttggtttgaaccgcaattaatggagaaagtattcttcaatcttttgtccaatgcctttaagtatacctccgacaaagggaatattattctgtcgggagagataacgaatagtgatataaaaattaatataacggataccggtatcggtatttctgaacaagataaagataaaatatttgcacgattctttcaggctgacaatcaagaaaagaaaggaagcctgtttagcggaaccggtatcggattggcattgaccagaacaattgtggaaaaacatcatggagagataacagtgaaaagtgttgttggtgaaggtagtacatttacagtgcggctgccccgccggaaagatgtattcctgaacgataagaatgtacaattttatactcaggattctgaaagtgatattatccccgattcaatgcctgtatttgtagatgaggggaattcgcccatagaacttattgagactaaagatacggaaaacaagactcatacggtgcttcttgtggaagacaatgatgagttgctccaagtgctgaaagagcttttcgagcctttctataagatcatttgtgcccatgacgggaaagaaggactcagtcagatttatgagaactctcctgatttagttatcagtgacgtcatgatgcctgagatgaccggaacagaaatgtgtctgcaaattaagaataatatagatttatgtcatatacctgtaattctgttgactgcactcaactctaccgagcagaacattgagggactcagccgtggtgccgatgattatatcacgaaaccctttcatgcacagttgttactggcacgtgccaataacctgatacgcagccgcttgctgatgcaacatcaatttgataagaaaccgatgtccgagattgatttggccagcataaatcctttggacaaagatctgttgaaacgggcttcacaggtgattgagcaacatattgacgatacggaatttgatattccggctctttgtaaagaagtaggtgtcggtcggtcattgctttatactaagttcaaagcattaaccggcatgacacccaataacttcttgctaaattaccgcctgaagcacgcagccactttattgaagcaataccctgatcttcccattgcagaggttagtgaccgtagtgggttcaatgcgcccgtatatttcagccgttgcttcaaaaaccagttcggatgtacacctcagaattaccggaaagaaaagaaacaggcagactgattcaggactgtttcttttttccgaaacaattcgttctgctattattcacaggacgaatggtgaagtccggctgagtacctttggagtaaatgattacttcttcgcctttctgtaaatctattttgtacatagattcggataaagctgtggcctcaaattggcgttttcctttgaagacaggtgaggatatgtcagtcactacaatgcaaggttcgcctgcaaggcttttgatagtgataaactcagtcttaccgtttttccggctggcagtgataagaaaagcaccttcagcacggaagtctttataagcaatgtctttccaactgtcgggaacggcagggaaaatgcgcagctttcctccccaactttgaagcaacatatcatggatagactgggcggcagataatggtgtttctatgaccgggcccgattcacgataaagtgtattgacagataagaatttagtaaacaacttgtcaaggtatgtaagcgcttcattgcctttacccaaagcggatgatatagaggatgctcccgtacatgaatatccctgatgtgccccggatttgccttgccaatagaggagtgatttctctatgaggtcgtattcttcgggattttccttattgataagatatagaggataggcagccaatagatgcgaatagtggcggtgcgagaaagcataaggaacatcccgtcctatcataagcccgttggccgggtctgtggggaacggtgtaagttcctccaaagtcgttctccaacgcgggataagcggatcgtctatgttcagccggccggtaatctcaagtaatgtccggcaccccaagataataatgccaggtcgaagttacaatctttcgcactgccatattccggagaatatgtttggggcagatgtaccttgccgtcttttcctttgtaggtaaagtgcaggtagtagttgatagcttgtttaagtacaggaaagagtttgttgcgtaatagctcgtcatccattttgtggcgataaatcaaccataagctatggcatacccaaggcaaaagcccgacttccgctgctttgtctacaccggggattccgatttcgccggattcgcataccagatttgacgagcgtcctattgccaatgcgtctttgcgataggcttccggtacgtttttcttaaggttttctatattgttgtaaatagcattctccagagaggctgccaaatcgagatgattggatgcattgagtgcccaataggtcagttgtacgttcaagttccaccatgcattgggccatggagtgacggtcagccatgggccggtgttgtctattagtgcacggtcgccgcgcgtggcactggcaagcttatacatctgtatccaatagaaattctctttcataccatccggtaacgtaaggaaactgctcggatagtaatgattccaccaggtacggtgttgtttctgtaattttccggttcctgttgctaatgccttatccaaaatttgagcggcatccttttcggccgtggcttcgggatacgaatgagttacggtaatccagtatgtgcgttcattttttttagttcgggtttctttccatgcaacggctgtttcacctcctgcccgcaatttctgaacggatacttccggttttacctccggtgccgggttaagagagtagtcttcaggcacctttatccattttccttctccttttgcataaagatatcgcgggctttgggcggaggcaggtatccattcccaacggaagtttttctctccatcggtggcgttagtctgaaccagcattaccatatcattggcgtgtacataggcgtgcagacggatgattccttttgtggtggttatctctgcttttgtttcggcattccagatgtcaagatgcatcgttccatttacgattgtaccttcaggatgtaaggcgaagtgcccggtgagcagtcggggaatggcaaataagtccgatcccgctttgtggtcgtgtaccgagcagttgccggtttcaaaccggatatagttctgtcccggttccttataaatcataagtcccaacataccgttgcccatataagccgattcataccagtattcgggcagtatttcccagatcaaatcttgtttttgcatgaaagcaggccagtctatatccgtttttactttttctgttcgggcggatgcggatgtatatcctgttactgacagacaaaggcataaaataaaaaagcgtattttaatgttcttcatgatgttgtatgattattatgtcgcaggcaaagatgaaaattatatctgtattaatcaatattttccccgttgatttggatgatttggaaaatagatgcaactattgaggacaatttagtcagataagataaaaataaatggtgctattttgccatacattaatatcttaattagatgatagaaaaaatacttatatttgtgttctcattattttatacaattatatgtattcggtcattcagaaaaggaaattattcatttataataaagaatctatatcatgaaattgaaaaactctattcttgcaggatgtactgctcttgtggtagccacatcttgcacccaaagagctgtcgagaaacaaacatgggttgaaaaagctattgaaaacgcacacgctcaaattggattggaaattgatactattgaaagtagcggcagatttctgaatccggtgacgctcaataataagggtggtgtctattattgcggatacgctgactggcggagcggcttttttcccggcagtgtatggtatttgtatgaactgacaggcgacactgctttgcttccgcttgcccagaaatataccgaggctattagcgaagcacaaaatcttacttggcatcacgatattggttttatcattaattgcagctttggcaatggcttgcgcctgattgataaacccggttataaggaggtaatgatccaagcagcaaaatctctttgtacccgttttcgtgaaaagcctcaagtgattcaaagctgggatgtgaaaggaaatagctggcagtcgaaacggggctgggaatgtcctgtgattatagacaacatgatgaatcttgaattgttgtttgaagcaaccaaactttccggtgattctactttctataacgtagcggtgatgcacgcagaccgtacgttgaaagagcaattccgcccggacggaagctgttatcacgttattgattacagtattgaggacggaaccgtacgtcatcgccagactgctcaaggctattccgatgaatctgtttggtctagaggacaagcatgggcgatctatggatataccgtatgttatagagaaacaaagaatcgtacttaccttgaccaggcaatcaagactttcgaatttatgaaaaatcttaagaatatgccggaggaccttgttccatattgggatatggacgcgcctgatgttcctgctgccccgcgagatgcttcttcggcttctgtcatagcatccgccttatatgagatgagtacttatgacctgccggacgctgcttcttaccgggcgtatgccgacaaaataatggagtcgcttgcatcagagagctatactgccaaattgggagaaaacggacggtttatcctgatgcacagtgtaggtagtattcctcataacagcgaagtggatgttccgttgaactatgcggattattattatctggaagctttgaaacgtaaaacggatattgaaaaaactgccatttaaaaagaatgattatgaaaatgagaattgttttattagctcttatttctttttgtttcctgagtgtaaatgccgctgataagaaaaagaatcaaccggtgaacgacagaacacagtgggttgacttatgttataaaatagcgcaacccgttctggagaatatgagtaaaggcgagttgcaaaagaatatgcaactggagttgagtcctacgtgggacggaagagacaagcgggtggcttatatggaagcattcggtcggctcatggcaggcatttctccctggctggagctgcctgatgatgatacggcagaaggaaagcaacgcaagcaaatacgtgagtgggctttgaaggcttatcaaaatgctgttgacccgcagagtccggattatttgctgtggaaaggacatcagcagcttttggtagatgctgcttatcttgcggaaagtttcatccgtgctcctaaggccacttggggacagttggatgatacgacaaaagaacgttatattgaatgttttaagaaggtgcgtgtcatccgtcctgcctataataactggttactgtttcgtgacatggtagaggctttcttgctttccgtcggtgaagaacctgacggttatgccttgactaccggccttaataaaataaatgaatggtatcttagtgatggatggtattccgacggagcggaattttcgttggattattataattctttcgttattcatcccatgtatgtcgagatactggaaacgtgcagcaagaaccgttttcctaccccaatcagttataagctggcaatcagtcgtatgcaacgttttaataccttcatcgaacgtcttatttctccggaaggtaccttcccggctttcgggcgttccgtagtctatcgtatgggagcattccaatcgttggcattggctgcctggaaatatggccttcctgaaggactgactaacggacaagtccggagtgcattaagtgcagtgatgagaaatatgttttcagtagatggaaattttgatgataaaggattcctggcacttggttttgcgggacatcagccggatttggccaactattatactaataatggtagcttgtatatgacttcactcgttttcttgcctttgggtcttcctgccgatcatcctttttggagtgatccggccgaggaatggacatctcaaaaggcatgggcgggaaaagcttttccaattgatggacaccagtcattaaagaagtgatgtttcccccgtcattatccgttcaacgcgggtaatgacacatccttctaaaaaatagatagtttaatggcttgaaacactaaatatcgaaaaagaggctaacgttaggtcagcctctttttcgatataagaatttttaattttactcttccgtgctttggagcatctggaacagtttgtctaacttcggagccatgataatctccgtacggcggttcttacttctgccttctgccgtttcgttgtcatcgacaggcatatattcgccgcggccgctcggttgtatctgcaaaggattcacgttatagtttttaatcagaatacgtacgacggaggtagcacgaatcacactcaaatcccagttatccttgaattgtacagtgttgataggcttattgtccgtatgtccttcaataaacacatcaatatccgtctgtttgttcagtacttcggccaatttgccaagagcttcttcaccacgcttatccagacgggcgcttcctgattggaataataatttatccgacattgccacatatacttttccgtctttttcgcgaacggtcagttcatcgctgctgaagcctaataacgcatcttttacgctactcaacagtttccggactttctcattctgcgcattgatcatctgctgcaactcgttgatagtacgctctctttcgttcaactcgtttttcttctggttcaacagggcgttcagtttttcctgttcggtcatgttcacattcagcatactttgatactggcggatactgtttcccatttttgttgtatcacgcatgaggtttttgatttgtaccgacatttggttgcccgtgttacggcagtcggtcagtagtccttgcaaactatctttgcttgcggtagctgccagctctgcaagcatgaacttctttttcgttacacatgaagtacataataggatcgtaaggaaggtaaataaagtaattttcttcattgtgttttatgttttaaaaggatatatacaattagctttgtagaaattcacatagtttttgcacagccagtgcacggtggctgattttattcttgatatcatttcccagttcggcgaacgtccgttcatagccttccggtttgaacacgggatcataaccaaaacccgaatcgccccgtttttctctgattatctcgccctttatcactccttcaaaaagatattcctttccgtccaatatcaacgaaatggcagtacggaattgtgctttgcgattttctttgccttccagttcgtgaagcagtttgagcatattggcttgggcgtcgtgtccttcgccgcctgcatagcgggcggaatagactccgggggccccgtccaaggcttctacttccagtccggtatcatcggcaaagcaatccaggccgtagtttttaaagataaacgacgatttcaacagagcatttccctccagcgtctcggctgtttcgggaatatccgtatggcaaccgatatcgttgaggctcagcagttctatttggtctcctaagatagcggctacttcttccagtttatgagcgttgttggtaacaaataccagtttgcgtttcatcatcttattttgtttttaacggggttgttcaatacttatcgggccaatcaaagcttggaaccggttattttactttcagtttttcgaatccttcgccatatactccgataactgaactttgggagataaaagcattcgggtcgatacgtttcaccagacggaagatgtcgagtgactggcgtttcttggcaagtactaccagtacttttacattggctttactgtaccagcctgtgccatcgagcacggttactccgcgatcggcatctttgatgatacggtcggctatttcgtcatacttcttggagaaaatgaagaattggaccgattggcgtgcactgttgataatccagtcgagcacgacgccaatgatgaacagggtgacgaaaccgaagataacacgacgccagtcatggaatataaagtaacaggaactgatgatgaatacatcgcaaatcataatcattcttccgagtgtcacatctttatatttgttaactatggcggcgataatatctgttcctcccgtacttccgttatagttgaacacaatgcccagacctacgccacacatggcggcaccgatgatacaggccatgaaatcctgtccgggaccgagcagtagcggtttaccgtcggctgtcatgtccggtacttccacataattgttgaccagtagttggaacaaccagagcaggaaagtcagcataaagatagcatacgtcgtttttatactgaatcgcgggcctaatatccggatagcaaatgtcatcagaacggcgttgataatgaaatatgaccattggatagggaatccggttgagtagtagatgatagcactgataccggtagttcctccggtcgttatctgatagggcagtaagaatgccgcccagcccaaagaatagctgattagtccgagagtgatgtaagcataatctttcacttctctcattattcccgcttttgctagtttatgcattgattttaagtattaggtgtcaaagtatcaggtatcaagtattaagtattcaccttgcggatatatatttgaatcatagccgtggtgatacttaatacttattacttaatgcctgtttaaataacaacgtttacaatcttcttcggaacgacgatgatctttttgggagtctttccttcgatccatttctgtgaacgttcgtcagccaatacggctgcctggatggcgtccgaagtttcatctgcagcaaattccatattgaaacgtgcctttccgttgaaagagatcgtgtagttgattgtatcttctttcagatattcttcgttgtatgccggccattgggcgtcgcatacggaagtttcgtgtcccagtacgtcccacaattcttcgcaaacgtgcggagcgaaaggagcaagcgtgatgacgagttgttctagaatctctttcttactgcatttcaggttgaaaagctcgtttacgcaaatcatgaatgcactgatagaggtattgtaagagaactgctcaatgtcaccggtcaccttcttgataagtttgtggaggcttttcagttcttccttcgttgccggttcgtccgtcaccagatattcatccgtgcggctgtagaacagcgaccagaatttgcggataaagcggtgtacaccatcgataccgtttgtatcccagggcttagactgttctaccgggccgaggaacatttcgtacatacgaagtgtgtccgcaccgtatttctcaacaatcatatccgggttgacaacgttgaacattgacttactcatcttttcaatcgcccaaccacagacatattttccgtcttcgaggataaactctgccgttttatattcgggacgccatgccttgaatgcttccagatcgagaatgtcattggatacgatgttaacgtctacgtgaagcggtgtaacgtcatactggtctttcaggttcagtgaaacgaatgtatgggtatctttgatacggtatacaaagttactgcgaccctgaatcattccttggtttactaatttttggaatggttcttccattatggatacacccatatcataaaggaatttattccagaaacgagaataaatcaagtgtcccgtagcatgttcggtaccccctacatataagtctacattcttccagtaccggtcaattttcgggtcaaccaatgctttatgattgcgcgggtccatgtagcgcagataatatgcggaagagccggcgaatcccggcatggtattcagttccaatgggaaaacggttacattatcaatcttttcgttttctaccacgcatttgttcgctgtgtcccacgcccatttcgtagcgtgtcccaatggaggctcgcctgtttcggtaggcaggaacttggcaacttccggaagttccagtggcagacagctttcttcgattacataaggcattccgtctttgtagtaaaccgggaagggttcaccccagtaacgttgacgtgagaagatagcgtcacgtaaacggtagtttactttcacgcgacccagattatgttcttttacatagttcttggttttttcaattgcttctttgatagtcagcccgttcagggagaggtcacagtaaggagtgacgtccggacgcggagagttgcagacgataccttctttggcgtcgaaactttcttcgctgacatcacaaccttctaccaacgggcggatttccaatccgaaatgcttggcaaaggcgtagtcgcggctgtcgtgagcaggtacggccatgatagctcccgttccgtaaccggccaatacgtagtcgctgatccagataggtactgcttcgcctgtgaacgggttgatcgcatacgaaccactgaatacaccggtaacgctgcggtcggcaatacgttcacgttccgtacgtttcttagtacggtcgaggtaagcgtctacttccgctttttgtgcaggagtggttaattgtgccaccaattcactttccggggccaacaccataaaggtaacaccgaacatggtatctgcgcgggtggtaaagattgtaaattcgagatcactgtcttttaccttgaattgaacttcagcaccttccgagcgtccgatccagtttctttgagtttctttcagagaatctgtccagtcgatagtatccagtccgtcaagcaaacgttgtgcgtaggcggatacacgcagacaccactggcgcatcttcttttggatgacggggaaaccgccgcgttcgctgacgccgtccactacttcgtcattcgccaataccgttcctaattcagcgcaccagtttaccattgtttcgcccagataagcgatgcggtagttcatcaggatttcctgtttttccttttcgttttttgcgttccattcatcggcggtgaaactgatttcttcactgcaagcggcattcagtccctcgtttccgtagacagcaaaggctttttccagttcttcgatagggcgtgctttctgctcgtcgttgcaataataactgttgaacatttttaggaaagcccattgtgtccaatggtaatattccgggtcgcaagtacggatttcacggttccagtcgaaagagaaaccgattttgtcgagttgctcgcggtagcggtcgatattgttgatggtagtgatggccggatgctgtccggtctggatagcatattgctcggcgggcaagccgtaagcgtcgtatcccatcggattgagtacattgaagccttgcagtcgtttgtaacgggcgtaaatgtccgaagcgatatatcccagcgggtgtcctacgtgtagtccggctcctgaaggataggggaacatgtttaatacataaaatttctgcttcgattcgtcttccgtaacctggtaggttttctcttccacccaccttgcttgccacttcttttcaatctccctgaaattgtactccatagtgataaagtttttatttatagtgatttatactgttatttctaatttgaggcacaaatttacgtgtttattttcagataaccacgctttacctattgactttctcgtttttatttcgtatatttggggaaattaaaaacagaaaagtaatcatgaaatatataagtattattacataggttcaataggtgaatgtgcaaaattgcatatgaggataacgaatgggcaagaaactgtgaaggttcttgcccatttttgttgcaataattcgatttgagtaactgaaagtgcctaaaaatagtttttaataaacttgggaaccgtttataataaactatttcattatttattaaaaactcgaagcgggtttatgcaatatcggtgataaagtgtaaagaagaaatatcgtgaggatttgccgatttttagttttttccttatttggtaagatttgtttatacaatgaaccctttgcgtttattggtattttatttgacagtgaccgggtgcttcggcaggaagtgactatttatagttttgtttagtcgagattctgtctgaaatatattcataagagtcggtatatattttcgtgattccctgtatctttgcggcattattaaaagtataagtatgaaactgacgcacggatactatcatctgattgccatactgacggttgctatctgggggctgacctttattgcaacgaaagtattgattaatcacggactcactcctcaggaaattttcttttatcgctttttgatagcctatataggtatttgggcgatttctccaaaacacttgtttgccgataatttgaaagatgagctttggttggtggcgggaggcgtattcggcggatcgctttatttcttcacagaaaatacagctttggggattacccaagcctccaatgttgctttcatcatttgcacggctcctctgctgactacgattctttccctgctcttttataagagtgagaaggctacgaaagggctgatttatggttcgctgttggccctgattggcgtagggctggtcgtctttaacggaagtgtggtgttgaagctctctcctgtgggtgatttgctcactttgcttgcggctctgtcatgggctttttatagtctggtaataaagcggatgacgggacgttatcccacggtatttattacccgtaagatatttttctatggggtattgactattcttcccgcttttcttcttcatccgctgcaaccggattttgatgtgcttctgcaaccgctcgtattgtccaatctcttgttcctggcagtcctggcttctttgatctgctatattctttggaatgtggttttgaaacagctgggaacgatgcgggcctccaattatatctatttgaatccgttggtgacgatggtggcttcggtgctcattctccacgaacaaatcacatggattacgttaatgggggcggcttgcatcatattaggggtttatctggcggaaaagaagtaggatcattccatcttttatctgccgggaaacttagaacaaatattgatattgtgtacccaagaacttccggatttgtttcagcgctttcgtgatttgtgcctctactgtcttgacagatatatccattgactccgcgatttcctggtttgtcaggttcttcgtgcggctttgcagaaatacctcacgacatttttcgggaagtgacaggatagcctcctgaattaaattattcagttcttctgtttccagtgaatcggtgatgcttacttgcggagtgtcctgtccgttgatatcgtccagtgagacagtagcctttctgtcccgtataacgttcagacacctgtttttggcagcctgaaaaagataagctttgaaagtaagcctgatttcaagtttttttctgttttcccatacggacgcaaagatgtcacttgctatatcttccgcttcttgtgtatctcctaaatacaaatacataaagcggcaaagagcagtgaaataagtatcaaagacgtacttgaacgcctgcttatcaccattctttatcaattgcaaaaggaacatatcgtccatagtgtttgtaattaggttagtgagacgttgcaaagttaaagaatatttttttagtagaaactaaaaaaatgcttttctgaataagggtatgattcgttttttgtgtcttagtatcggtaacagttaaaaacgacagcgaagcatgaaaaaagaaataccttgggagttaatcatttccgacctgaaacaagacatctccgatgctgataaaaagcacttggaggagtgggggtctatcgatgagaaccggaaggtgtatgaagaacttcggggagtttgggaaaaggtgcgtgctaaagttatcaattatacgccggacgtagatttctactggaaagagttgatgcagcgtatggaggagtgtgaggaggctgaacggagacaagctgaagatatggaaaggtctgaagataaagttgaagtgaatctcaaagataaggaacaacctgttcgtttgtgggctttcccccgttttcaacgctatgttgcggctgcctgcgtagttgtggctgtcttcctttccgtttctttatatataggtataaagatcggtcagccggaaatggcgcaacaaacctattccaattggggaggtaaatcggaagtaactctgccggacgggtcgaatgtatggattcattcggctacttcgcttacttataatacgaattattattcgaaaaacagaaatgtccggttgaacggagaggcttactttgatgtggcccatgataaggatcatcctttcgtcgttgaaaccgaaggaatgaaaatcaccgtacacggtacaaaattcaatgtagaatcctttcccggttcggaaaatacatttgtcagcctgaaagaaggttcggtgtcgttggagacgaaagcggaaacccgttttctgcatccgggagaagtcggtactttcaacaagcgtaacggacggcttcaaatagaaaaaggagatatcgagttggctgtctcgtgggcaagcaatcagattgtatttaaaaacaggccgttggatgagatttgccctcttctgtccaaatggtataatgtgaagataaatttgtctccggaattgcaggaacagtacagatacacattcaccttgcggcacgaaccgttggaagaaatcatgcgaatcatgtcgcgcattcatcctatcaactatgaatttaatgatgagaatatgttgacaattttaccgaagcagaaacaataagtggtaacacacaatgcaaatatccgagttcaatatcggtaaaatgatttttttgacaaataagtaagagagaaaggcgagcctatgatataatgaagatatagaataaataagggggaagttccgcttccggctttcccccctaccaaatcaagttttttattaaccgaagaaagtgagtgaacattaaaatctgacccattttaatgcagcctccttacagttaacttttaatatcgcaaaaatatgaatttaaaaaagcattttgcacttttaacgctattattttttagcgttgtactttctgcacaagtaaaagagaagatgataacgataagcttctcgaaaattccattgtccgaagctatggcacgcattgagaaaaccagcggctataccttcttttatgacgcaacacaagtaaatgtgaaacaggaagtcagcctgaacgtgaaacaggttcctgtatccaaagcggtaggagaaatgctgaaaggcattgacctgtcatttgaagtgaccagcacacagattgccttgttccccaaaaagagtactccggcacagacgggcaaggcgactacaatcatcggtaaagttgtagacgagaacggagagcccattatcggagctaacgttttggtagccggcacaacgaccggtgtgattaccgatattgacggtaactacaaactggaagcgcctttcggatcttcgcttcagatctcgtatatcggttatacgactcagacggtgaaagccgggcagaagtctatcatcaaaatgaaggaagactccaagacactggaggaggtcgtagtggtaggttacggtgtaatgaagaagaaagacctgaccggagccgtggcatccttgaaagccagcgaccttgaaaaagaacaaccgaaaactgttcaggatatgctccgcacgggtgtggccggactttcggtaggtatcgaaaccgacacgaagggtaacaccagcatgatggtgcgtggtaaaaacaacctgcgtgcaacgagtacggataaatcttcccttgaacctctgattgtattggacggagtaatctattcgggacagatgaccgacatcaatcctaacgacattgagcagatagacgtattgaaagacgccagttccacagccgtttatggtgcgaaggcagccaatggcgttgtgctgattactaccaagaaaggaacaagttcaacgaaaccgattatcaatttcagtggtacatggggactttcaatggtgaactctttgccggaagtatacgaaggagaggatttcatcaatttccgccgggatgtggaagttagcaagaatccttcaaaagcagctaccggatatttcgacaatccggcacacatgtccaatgcggacttggcaaactggatgggaaacgataaaggcgacccgacaagtatctggctgacacgtctcgaatttaccaatacggaggtcaacaactatttggccggacgtcttgtagactggcgcgatgtcatttatcaggatgtagcgttacgtcaggattacacggtcagcgtggcaggaaagaaagacgaaatgtcttattattcatctatcaactacctgaaaaacgagagtaacgtgcgtggcggaggatacagtgctatccgtgcacgtatcaacctggagaataagatacagagcttccttacttacggtgtgaacgcacagtttacttcacgtgatgagggatatatcagtagttcatccggcaattacactactctttcacctttcggaagcctttacgaagacgatggagtgactttgaaacaataccctaccggtaacaataaccagagcaacccgttgcttgctccgactttccagaataaacgcaatgacatcgagaacttgaatgcagctctttatctgaaaatcaccctccctttgggcttttctatccagactacttattctccgcgttttgaatggacaaactatcttttccataaggcagccgcttctcccgactccggttcgcagaacggccgtgtggaacgtacgcatacgaaggatttctattggcaatgggataatatgctgaagtggaacaagacattcggcaagcacgcttttgactttactttccttgccaactgggagaagttccagcgttggcatgatgaaatgacgaatgaaaacttcctgcctaccgacgaactgggttatggaggtatcggtttcggtaccagccctaacgtatccagtgatgatgtctaccgtacaggagacgcctttatgggacgtctgcactatgtatacgaccagcgttacctgattaccgccactgtacgtcgtgacggatattcggctttcggtcttgccaacccgcgtgccacttttccggctatcgcattgggttgggtgttctctgaagagaaattcctgcaccgtccggattggttcgaatatggtaaactgcgtctctcatggggtaagaatggtaaccgtgccgtaggtacttatgctgcattcatgcagttggccccgcgcaaatacatttatgtggatccggcaaccggcagtctggtgaccgccaacactttctacgcttctactatggctaatcccaacctgaaatgggaatcaacgacttcatggaatatcggtacggacctgactttcctgaaaggcagactgagcgcgaacctggatgtatataagaagattacgaccgacctgcttgtcagccgtgagttgcccagcctgatcggttacagctccgtgatgtctaatatcggtgaggtccagaataccggtgtcgagctttcactgaactctaccaacatcagaatggataagcttacatggcgtacttctttcagcctggcttataacaagaacaagataactcacctgtacggaatcatggaagatgtgaaagatgcggacggtaacgttatcggccagcgtgaagcggacgatatcaagaacaagcgtttcatcggacacgatattgatgaaatctgggattacaaggtagtgggaatctggcaggaagaagaacgtgaagaagctgccaaatacggtcagcagccgggtgacgttcatctgctggataaagatatgaactacaaatatgacaatacggataaggaattccagggaactacgatgccgcgtctgcgttggagtatgcgtaatgatttcacgttgttcaagaacttcaatatctcgttcaatatgtactcctatatcggacataaaaagacattgggacgttttaccaacgacaatgctttgctgaacgtgacgaaccagattaaacgtgactactggacgccggaaaaccgtaacaatgaatatccgcgtctggccaacaagaagcctgccggcgtttcgtatgccatttacaagaacgcttctttcctgcgttttgataatatctcaatcggatatactttcccgaagaagctgatagagccgctgcggattcagaacctgaacgtcaatgctacgatgaagaatgcaggttatatctccggttggcccggttacgacccggaaaacagtgatgcaaataccccgagagtaatttattttggtattaacttgactttataatatctacagactgatgaaactaaataataagaaaacaggcattgcctgcatgattggagtagctgtattagcaagtagttgttcggattggctggacccgaagccactttcattctatacgccggagatttcttttacggattacaacggcctgaagaccggaacggatatgttgaaccgtgacgtccgttactttgatttttatcccacaggaggctctatggacccttgtatcctttccgaatatttcttttcggatataagtgtcaacggacgtactgacgcggcaaactctccacaggatcttgttcgacagattactcctagtgcttctctgacaggaaatgcaagtcagattaataactattggacctatctgtataaaggtattaaagacgccaatacattgctgacccgttcggaaacggcagagtttgacaatgaagaccaacgtaaggaaattgaaggattggcatgtttccatcgtgcttatcgttattaccgtctggtgaatcagtatggggatataccgttcatcacagaagaaatcaccgggccacgttatgatttttattcaacgaagcgtgaagcaatcttgcggtatctgaaaaacgatttggaccgtacggctccttatctgaaaaacaacgtttatatcggtatggtgactcaggctgcggcttatcacttactgacaaagatcaatcttgcattgggcgaatttgacgatgcaatcgaatcagccaataacgtcattaatgacggagtgcactatctaatgacagagcgtttcggtgttgacaagaatgacgctaccaagaatgtgatttgggacttgcatcagtctgagaataaatccttgcctgaaaacaaagaagtactttacatggtgctcgaccgttatgatgccggtgaggatattcgttcggcagccggactggaaatcaaacggcaggtgcttccctggtttgcaaaagacggcgagattaaaactcccgacggcaaaaacggatttaccgataacgatgcaaagaaaaatccctatcttgagcaatatggtcgtggagtatgtacagcacgttctacctggtatcatacgcacatgatctggacactggatgacacagatcttcgtcatgctccgggtaactggatagaaatgaccgacctgacctacaataatcctgaactcaaaggtacggaatggtacggacaaccggttcgctttaaagacgataaaggaaacatcctggtaaacgataccattcgtgactgggtggggtggccgcattataagaccaacgttgccgaccagaaagataaatggtggcgcggtggttgggccgactggtatattttccgtattgccgaaacgtatctgttacgtgctgaggcatacatttggaagggggatgcaaccagcctccagaaagctgccgatgacgtgaacaaggtacgccgcagagcgggagccgatgaacttgatgctgaccagatgactatccgtacgattctggacgaacgtgcccgcgaactgtattacgaagaaccgcgtaagacggagttgacccgtatcgcatttatctatgctaaaaccggcaaggcggacgataagggacgtacttaccgtatggataatttctccgagaaaaacttcttctacgaccacattatggatgtaacggatttctataacaaaggggtgaaaacgccgattggaaatgaatataccattgctccccacaatgtattgtggccgattgcattgaatgctatttcgacaaatgtgcagggacatatcaatcagacaccgggatatgccggttcggaaaacaatatcgagccgttggacattgacttcagcaagtaacgttttcttaatggtataacgtaccattaacttcctgtttattgggcatatatatccaccacgctgggcatatatgcccaatatgttgaatctatatatccaccatggtggatatatatttccaataaatccctcaattatatccgatatttggcgtatatttgtactttgtcgggtattggaaccaaaaaactaccgaactttcataattttttaaacgataaacgaatgaatctaagaacaaaaatcggggtcgtagcagtgctgctgtctaccctcaccgtgcaagcacaaaacattcctttccgtaaagcggaaataaaagaaacgatgaagaaagttgccgactggcaaatagccaaccccaacaagggcgccgaacatggtgacctgagctggacaaacgccgtactatatgtcggtatgctcgactgggcggaattggcggaacgtgaagacggtaacaaggattattttaaatggctcacccgtatcggaagccgtaacggctggcagccggacaagcggatgtatcatgccgacgacatcgctgtttcacaactctttatcgacctttaccggaaatataagaacaaatatatgctcaatcctaccattgcccgcacggattgggtgatgaagaacccgccgacggacgatttcaaactggattatcgcaaacctgagacactggaacgctggacttggtgtgacgccctctttatggctcctccggtctacactaaattatacgtcctgacgggtgataaaaagtatatcaaattcatgaaccgcgaatacaaagctacgtatgaccaccttttcgacaaggaagagaatcttttctatcgcgactggcggtattttgaccaacgcgaggccaacggccggaaggttttctggggacgcggcaacggctgggtactcggcgggctggcggagatattgaaagaactgcctgcaaaggacaagaaccggaagttttacgaagaactgttcgtgaagctctgtacccgtgtcgctaaattgcagaatgcggacggattctggcatgcaagtctgctcgatccggcttcttacccgtcacccgaaacaagctgtaccacgtttattgtctatgctttggcttacggaatcaacgagggactgctggacaaggatactttccttcctatactggtaaaaggctggaatgcacaggtttctgctgtcgatgcagacggtaaattaggttatgtacagcctatcggggccgatccgaagaaggtgacgcggaatatgactgaagtatatggcgtgggtgcttttttaatgggcggatgtgagatttataaaatggccagataaacaagaactcataatctaatggtaaaaaatatgattgtatttctgctcctgttactgggagcagttatgaatgatacgtccgcacgtgatgtcatttctttcaataccggctggcaatttaagaaagggccgttttctacggaccctatgcgtgcttccgcacaatgggacggcaagtgggaggaagtgacaattccccatacctggaatgcgaaagatatgcaagtgaaagctgatgcattctacgaaggtgtaggttattacagaaagaaacagtttttcggaaatgagttggcgggtaaacgtgtattcttgcgttttgaaggagtaggggcttgcacagaagtctatgtcaacggaaagttggtgggaacgcataaaggcgggtatagtgccttcgctttcgagataggcactgccttgaaactgggggctgagaacgagattatcgtgaaggctgacaatacggcccgtcccgatgtgattcctgtcaatcacagtttgtttggggtgtatggcggtatttaccgtcccgtatggttgattactacggagcagaataatatcacagtgaccgattgcgcctctcccggtgtgtacatcactcagaagaatgtatcaagacgttcggcggatataactgttaaagtaaagctggataatggtagtctggctcctgcgcagcttgttctggagaacagtatttatacgcaggaagggaaaaaggtggtttctcaacgtctgccgcttgagttgactccgcaaggaacacaaagctatgtatcaacattcaaactaaagaatcctcatctctggcaaggtagggaggacccttatctttacaaagtagtctcccgtctgttggcaaatggtgaggtgattgacgaggtcacgcggcctttgggtgttcgtcattacgaaattgttgccggaaaaggtttctatcttaatggagagaaatatccgatgtatggtgttacccgtcatcaggactggtggggcctggggagtgcgctgaccaaccgtgaacatgattttgacctggctcaaattatggatgtcggtgccacgaccgtgcgttttgctcattatcagcagtcggaatatctttattcgcgttgtgatacattgggcttgattatctgggcggaaatcccctttgtcaaccgggtgacaggctacgaatcggagaatgcgcagacacaactccgcgaactgattcgtcagagtttcaatcatccctccatttatgtgtgggggttgcacaatgaggtttatcagcctcacgaatacacagcgtcattgactcaatctcttcacgatctggcgaagacggaagatcctgaccgctacacggttgccgtgaacggttacggtcacgccaatcatccggtgaatcagaatacagatatacaaggcatgaaccgttatttcggctggtacgaaaagaaagtgcaggacatcaaaccgtgggtggaaggactcgaaaaagactatccctggcagaaattgatgttgaccgaatatggagccgatgccaaccttgaccatcagacggagtatttgggcgatgcgttgaactggggaaagccttattatccggaaactttccagaccaagacgcatgaatatcagtggagtgtgatagctgagcatccctatattattgcttcttatctatggaacatgttcgactttgccgtgcctatgtggagccgtggcggtgtgcctgcccggaacctgaaagggctgatgacctttgaccggaaaataaagaaggactcttactactggtataaagcgaactggagcaagtctcccgtactctatctgacgcaacgacgtaacacggatcgcgaacggaagcagacttccgtcactgtttattcaaatatcggaactcccaaagtttacttgaacggcaaagaactgacaggcattcgtaagggatatacggatgtacattatatcttcgaccaggtgacacttgaaaaaggaaaaaacaaaatcaaggctgttgcggtatataatggaaaagaatacgttgacgagatcgaatgggattatcagagtgaaaagaaacgtgatgcggatgcgcacgaaaacaaaaatgaacatgccgggtggtaaaacccggcttatggacataaaaaaaggagcaacgccttgctccaacctttgttaaccttaaatctaatactatgaaaaacacattgcaaagatacggactcttagggaattagcaaattatccaagtaaaatactatgttttataacacgttttaatagttttctcctgtttgttaagaaaaacgccgttcttttttaaaggtatgcaacactaattttgataattgaatcggtggattccgttgattctctgccgaaaaaccgttatctttgttccgataatcacagtatatactcaataaaaaaagaaaaggagagaaccgtgaacgaagaagaaatcgtgctcacccccatgatgaaacagtttctggatttgaaggcgaaacatccggatgcggtaatgctgtttcgttgcggtgacttttatgaaacatactctacggacgccattgttgcagccgaaatattaggaatcacactgacaaaacgtgctaacggaaaaggaaagacgattgaaatggcgggatttcctcatcatgcgctcgatacttatcttccgaaattggttcgtgccggaaaacgggtggctatctgcgaccagttggaagacccgaaaatgaccaagaaactggtgaagcgcggcattaccgaattggtgactcccggtgtctctatcaatgataatatattaaactataaggaaaacaacttcctggccgccgtacatttcggaaaggcttcctgcggggttgctttcctcgacatatctaccggtgaatttctgactgccgaaggacctttcgactatatagacaaactgctgaataacttcggcccgaaagaaattctttttgaacgtggcaagcgccttatgtttgaaggcaatttcggtagtaaattcttcactttcgaactggacgactgggtgtttacggaaactactgcccgcgaaaaacttctgaagcattttgaaacaaagaatctgaaaggattcggagtagagcatttgaaaaacggtattattgcttcgggggctattcttcaatacctgacaatgacacagcatactcaaatcgggcatattacttcattggctcgtattgaggaggataaatatgtccggctggataaattcacggtgcgcagcctcgaattgattggcagcatgaacgatggaggaagcagtctgctcaatgtgattgacaggacgatcagcccaatgggagcacgtctgttgaaacgttggatagtttttccattgaaggacgagaaaccgatcaatgagcgtctgaatgtggtggagtatttcttccgtcaaccggactttaaggagttgatcgaagaacagttgcatcttgtcggtgatttagagcgtatcatctccaaagtggctgtgggacgtgtgtcaccgcgtgaagtggttcagctgaaagtggctttgcaggctatcgaaccgatcaaacaggcttgtcttgaagcggataatgcaagtctgaaccgtattggcgagcggttgaatctttgtgtttctattcgtgaccggattgcccgggaaattaataatgatcctcctttgttgataaataagggcggagtgattaaagacggtgtgaatgcggatttggacgaattgcgccggatttcgtattcgggaaaagactatctgcttcagatacagcagcgggaaagcgaagaaacgggtattccgagtttgaaagtggcttataataatgtattcggctattatatcgaggttcgtaatgttcataaggacaaggtccctaaagagtggattcgcaagcagacgttggtaaatgcggaacgttatatcacacaggaactgaaagagtacgaagaaaaaattcttggtgccgaagataagattcttgtgctggaaacgcagttatatacgaatttggtacaggcattgacggagtttatcccccagatacaggttaacgccaatcagattgcccggttggactgtctgttgtctttcgctaatgtggcgcgtgagaataactacatccgtccggttattgaggataacgacgtattggatattcgtcagggccgtcacccggtaattgagaaacagcttccgataggagagaaatatattgccaataatgtgatgttggacagcagtacgcagcagatcatcataataaccggtcccaatatggcgggtaagtcagcgcttttgcgtcagacggcattgattacgctgttggctcaaatcggttcgtttgttcctgcggagagcgcccatatcgggctggtggataaaatattcactcgtgtgggagcaagtgataacatctccgtaggtgaatctacttttatggtggagatgaacgaagcggcggatattctgaacaatgtttcttcccgaagcttggtactatttgacgagttggggcgtggtacctctacgtatgatggcatctctattgcctgggcgattgtggaatatatccacgaacatccgaaagccaaagcacgtactttattcgccacgcattaccacgaattgaatgaaatggaaaaatctttcaagcgtatcaagaactataacgtatcggtgaaagaggtggataataaggtaatcttccttcgtaaactggaacgtggtggtagtgagcactctttcggtatccatgtagcaaaaatggcgggtatgccgaaaagcattgtgaagcgtgcgaatgagattctgaagcagcttgaatctgataatcgccagcagggaatagcaggcaagccgttggcggaagtaagcgagaaccgtggtggtatgcagttaagtttcttccagttggacgatccgatactctgtcagattcgcgatgaaatattaaatttggatgtaaataatctcactcctattgaagcgctgaacaagttgaatgatataaagaagatagtcaggggaaaatagcggattattaacgtgttcacaaatagtatatagaacgttttctgagatctggaaaacgatttgtaagtataaaaggcgtttcctttaagtgattggaggaaacgcctttctagtatgcagtcgatttttatatatcaggttcaggctacttttttcttccggtcgtagaaaaacatgaagtagatgccgactataacgaatggaatacttagccattgtcccatgttgaacatcatgttgttctcgaaatcctcttggttctccttcaaaaattcgatgaagaaacggaagacaaatatgtaggtcaggcagagcccgaagaagaagccgcgatgcagtttcttgctgtaattcttatacaggtaaatcatgatgaagaacaagataagataagcgatcgcttcgtagagctgtcccggatgacggggttgcatatctacccgttcgaaaatgaatgcccagggtacatcagacggcttgccgatgatttcggagttcatcaggttggcaagacggatacagcaggcggtaattggagtagctacggcaatcatatccagcacgtccatataatgaagttttgttttgcggcaatagagccacagagcaataatcagtccaagtgtccccccgtggctggcaagtccttcatatcctgtgaatttccaaccaccggcaggcaggaatttaataggtaacagcatctctacaaaccctttactgcttgtcagatactgtcccgggtcgtaaaacaggcaatgccccagacgtgctccaatcagaataccgaaaaaacaatagaagaagagggggtcaaatttcttctcatctatttttttatcgcgatactggtagtgaacaatgacgtaagccagaaaaattcctactgcccacaatagcccgtagtaacggatagaaaggccgaacaggttaaatagttcgggattcggattccagttgatagataataataaggtattcatattggataacggtttacggtttggtgaattagtgtttagtgaatttttcggctaccatccggtaagtaggaatatcaatcccttgttcttccgcggcggtaatcatgtcgaataacaatccttgtatctccgaatcatgtccccgtgccaggtctttctgcatggaagcggtactttccgggtcgagtttgtcgatgactttcagattatagcttatcgggtcttcgggaaattctacacccagtttacgtcccagttcgacactctccgtagaaagtccgatgaaggtatcgcgtacctttcccagtttctgtacctcgcccatggggacgtcatagtaagctccggtgacagccattgccgagatgaatgaccatttaatgaaggtatcccggttgatatccggagagatttccgctttgattccgccctcctgaagatctttctgaacggcttccagtattcccggggcaacttgtgtccctttgtgggctccgtacaccaggcggaaaatttttcccatttgagtgatctctcctgtaccggatacgaatccgacaatatagatgcaaccgtcgagtaccgtcactcccggaacgagacgttggatacgcggtcctgttccgtaaacattcagaataggaatgacgattgtcttgtcatgtgccgccctctttatcagttcggtaatcgagtcgacagaataccccttgacgcagacaaagattacgtctgcctttccattgaattcttctgctgttgttgccgggatagcaagcgtgtgctctcccttcaagtccgatttcaatttcaagccgtttgtctgtattgcctgcaaatgagctccgcgggcaatacaagtaacgtcttttccggcaagcgacagaaatcctgctatactgcctccaacgcctccggttcctgcaatgagatacttcataataattacaatttgctgattacaaatgcaaggttatcgcgattatacgttgaaacggaagtgcatgatgtcaccgtcctgcacgacgtattctttgccttctacgcccagttttccggcttctttcactgctgcttccgaaccgtaccggatataatcatcgtattttatcacttccgcacggatgaatcctttttcaaaatcggtatggatcacaccggcacattgcggagctttccaacctttctcgtaagtccaggcacgcacttcctgtacgccggcagtgaagtaagtttcgagattcagcaatttataggctgatttgataagacgtgctacgcccgattcctccaagcctacttcggcgaggaacatctgacggtcttcgtatgtttccagctcggcgatgtccgcttctgtcttggctgcaacaaccagtatttcagcattctcgtcttttacggcttcacgtaccatatctacgtatttgttgccgtttactgcacttgcttcgtctacattgcagacatacattaccggtttgctggtcaacaggaacagttcatgtgcaatcttctgttcatcttttgtctcaaaagtaacggtacgtgccgatttgccttgttccaacgcttctttatattgaaccagtacatcgtaagcctgtttggcagctttgtcgccacccgtttgtgcttgtttctgtaccttttggatacgactctcgatcgtttccaagtctttcaactgaagttcatagtcgatgatttctttgtcgcggacaggatttacacttccgtctacgtgtgtcacgttatcgtcgtcgaagcaacggagtacatggataatagcgtctgtctcacggatattggcaaggaacttgtttcccaatccttcacctttacttgcaccttttaccagtccggcgatatctacgatttctacggttgtaggaacaatccgttggggatgtaccaattctgccagcgcattcagacgttcatcgggaacggtaattacacctacattgggttcaatagtacagaaagggaaatttgccgcctgtgctttcgcattcgacaaacagttgaaaagtgtcgacttacccacgttcggtagtccaacaataccacattgcaatgccatattaatctattatttctattattatcaataggatacatatatatgaacaatgatttggaggcaatacccggataaaaaagagtgtttgttaccaagttgttcatttttagtctgcaaagataatcattttttgagctaataaaggaaacttggtatactttctgtcttttccccttattccggcttacttttagtatggaaagtaaagtcacagaataaggggattttagtattaattattcgtaaggcggcacttcggaaatactaccataccggtgatattcgaaagaaatgctttgttccttgaagtagcgaataagttcgatgcgtccctgtttcataggaggcgctgccacaatatacatattggtttccgcggcacgttcatacatacatttggggatattcggagaacaagtacgtactctttcatagtccggcatcactttcaggaagtcctccagcgattcctttcgaagcggccagccatattgggtaagtgcggcagtacggtcatccgaggggtcgaagctgatagtgagaggtgttctacatagttccgaggcgtatgagatcatattgacctctctatctgtgtcttccggaaaaagacgtagaatcatgcttttcaaaggtaagtaacggaagacattctgttctccgtatagcttattaacatccctcgggtccataaattcttcctcacaagcgtcgaaataactgtctatgtaatcagtctggctgtccggcttgtctgtgatttctacaaaacaggtacaataattgggacctcccgctttgataccgcctccgaaagcagacagtttcattccaccgaatggctggcggttgacgattgctccggtgattccccggttgatatacaggttgcctgctattacggagtttttccacagcttttgttcctcttcatcaagactctgtaatcccgaagttaacccgtaatccaggctattgactaacttaattccttcttcaaggttctcgatgcaggcaacactcagcagagggccgaataactcggttcggaaagagaagttttccggtttcactccccatttcacggtcggagccagcatatattctttctcatcgatgaaacggggaggaaccagccacgattctcccggttcgaggttgaaggcttgcagcaacttgtcgttcttattggtaatcatcggaccgacaatatttccgggattccagacactgcctactttcaggctcgttgccgcatctttcagtttgctttggaagttcttgtcttcatagaccgaacgttcgaccaataacagagaacaggcggaacatttctggccggcattaccgaaggcggaagcgacgatgttcatgatagcatggtcacggtcgcccgatgcagtgaggataatgacgtttttgcctcccgtttcggctgatagcggagttaccggattggctcttgcgatattctgggcggtgtctgttcctcctgtcagaatgatatgcttgattgcaggggcggtagtcagcactttcagcgcttcccggttggtgatgatgacttgtaaggcctctttcggtacacctgcatcccaaaaagctttggcgaacatccaggcaaccggagccgctacggtggcaggtttcaggataacggtgtttcctcccgccagtccggctactataccgcctacgggaatggcacacgggaagttccacggtgaaatgaccaatatggtacctttcggttttatctctatatcatctaatgcggcgaatttcttcatcgctgtcgtgtagaaacgggcataatctaccgcttccgatacttctacatcaccttcaatgacagttttaccggttacggcacacatacaacctatcaggtcacccctcatatcagcgagccggttggctgcttcgtacataatccggtggcgttcttccagtgtggtttttctccacccagcaggatctgtctcggcaatttcgataatcttttccacttgagcactgtccgcctgtgacatttcacagatacagacctcgtcattctggcaacggtcgaggtatttgtagcggtttttgcatactactgtttccgcacctatctgtaaaggaatgatttccggttcttccgttccgcttttcttccatttggcaaagatacggcgcacccattcctgattttgtgacaagtcgaagtccgtatccggttcattctgcattgtgtccgatggggcgacgggagtgtacggaagattacggttctgaacgcgtggagacacatgcgtgaggtgatctttcatagcataggcttcttcaaactgctttgcgaggaagtcccactcttttgtatccggtttcagattgaaggagtgagtcaggaaattgtcgggtgccgtattttcgtccatgcgacggacaagataagagacggcgttcaggaaatgttcgtttttcactaccggagtatatagaatcacccggttgccgagcattgactgcgctctccaaagatgattcgccattccttcgagcatttcgaaggtcatatatccggttgtcccgtacttctgagccagcagataagcataagcgatcgagaacagattatgagaagcaaccccgagatgtaaaacccgggcattttcgggcatcagtccacgttccaacaggcacagataattggcgtcaacttctgttttggaaggacgaatcgggttcggccagcctttcagggaggagataaccgtttccatttccagattacagcctttcaccagacgcattttgataggagctccgcctccgtctacgcgggctttggcaaattccagcaactcggtttggaagtcgtatgcatccggcagataagcctgtacgacgattcctgccgaatagttcttgaattgcggcaggttgagtactgctttgaagaggcgcaatgtgaagtgggcgtctttatattcctccatatccaggttgatgaacttggagcgttttattccgtcttcgtccgtataaggaaaatcaatggctttctgataaagcgcggacattcgtgaaacgagttccgggaaactttcttcgtagttcagagcgtgtgtctgcgcgtagattcccgatattttcactgagatgtaattaatgtcgggtgattcaagagcttccagatagtgatgatagcggtgatcggcttctccgttgccaagcaccacctcgcctaaaagattcacgttctgcccgattttctctttgaagcgggtagccagatgcttcgtgagttgcgggcgttcctcattgataataacttgcgaggtatccatgcgcaggcgttttttgataatcgggatagcgataaagtcgaaatgatgtccgaatgcctgatacattttgaataagaaagcatcccgtttgttcagaaattcggggacaccgtactggtcaaggagagtcttgatacgtttggcgagtatcttccggtcgcggatttgcgaggattcgtcgagcatcttcacgaggaatttcttgtcttgcgggcgctgcaccatgacggcatatttatgctgttccaggcgttcggctttcgtaatcgtttgttcacaagtattatacagtttaagtacccaatcctgtacttcggtaagggtcggttgatattgtttgtccataagaatctgaattatgtaaatggagaaaatgtgaaaaaagaatctcaaattgcaatttacatagtacggagggtaggactaaacataacagcacggtagcgatgcagggtttgcaacgcttgctgcgagaagcagtcgaacagatactgttgtttcatattcgtcgtttttgaaggtgattagaaacgaaagactcacacttctcacaaagataaaaataaattattgattttcaagtaaaaggggaagaaaatgcaattgtgataaattctaatatgtatggtatgagttgatacaagacgcgagcgaaataaattaatcttaatctctctaagatttagttgttcggatactattaattagtactcgttatgcatgactttattaactatgaggagtaaatatgtgctaactttgaattagttacctcctttagtatctggcctgatatttcttataaaaaatcagaaacaggatgaatccggtcagtgcgaaaggaacacctgtgagggcggggtaacgatagccttcactaacagtcaatccccctgcataagcgccaatggcatttcccagattgaatgcgacctgtacgcaggcagcccccaacatctcgccgccttttgccacacggataatcagtatttgttcggggctggatacggcaaacaaccctgccgtgcaaaggcacatcagtatagcagccgtccatttgtagggagaaaggaagaaaatgagaagtagcataaggcatattaatgcttgtgcggcagttcccacttttccgggtgtatagcggtcggagaggcgcccgctgataagatctcccatgaccataccgaatccggcaagaatcatcagcggagtaatactttcggtggagaaaccggaaatattcgtcagcatagggttgatatagctgtaccaacagaatacgccaccgttgcctaacgccgtagcaccgagaatgagccagggagccggagtcctcaagaaatggaattgtcctttaaagccggtatccttcaagccttctacgtgaggtacccagcgccagatgtaatacaggataacgattccccagatgccgaccaacaggaaagtggcacgccaggaaagcatagtgctgagagaagttcccaatgggacaccgaataggttggcaatggtcattccggcaatcataatcgaaacggcttccgaacctttccctttatcagccagtctttcggcaacaatggagccgacgccgaaatatgctccgtgcggtagtccggaaatgaagcgcgcagcaagcaatatccaataattgggagctgttgcagcacagatattacctatcataatcagggtaactaataccagcagaatatgtttcaacggatatttgcgggctaatgtcaacacgggggcacccacacagacacctaatgcataagcggaaatgaaatgtcccgccatagggatactgatccctaaatcttttgccacatcgggcaaaatacccatcattacaaattcggcaatacctaatcccagggtgccgaacgccaatgcgataagactctttttcataccaaacttaacctgatacctgtaactttttacctttttcttttttgcgggtgcaaaggtaaaacaaaatcgggcagagtgagttcggtgtgaaatattttgatttaagtcaatttatacaatgctgcgtatgtaagactatggattttaataattgtgtttataataatattattgcggttttttttattaatagagattgtcttttcaattgctctttcctgaatgtttaagaatccagtctgttatatcttttagaacttccgggctaatggtttcttctagctgcccatactccgccaatgttcctttttcacaggtttgaaacagatgatttaagttcgggtaggcttttaccgttacattcttattcccgttctcgctgattctttgttggatagccgtaaggttcatagccgcctccacttgaatgtccttttctccgtttaaggcaagtaccggacattttatttttttcatggctttagccgggtcatatctcataaaatgaagataccagggggaggtcatggaacttatctgggaggaaatctgctgtacggtattcaagtctttcagttgttcggacgacatggttttggtaacatctgcatataactctttttgaagttcatctgtggttttgtctgcttgttgcagtatggcatacctgtttcgtatcgacggtttcgttccttgccagaacgcatccggcattccctgggatttagaaatcatctctacttgtttcagcatcaggctgtcacctcttacgccggctcctgccaatgaaacaataaacgcaatcgcagggtctttggcagctacgatgaatgctatgattccgcctgcgctatgtccgataatgccaatcttctttgtgtttatttcttttctgtcgcgcaggtaattgatggcagcttccgtgtccgttgcgaaatcctcgttggtggctgttgcatggttgccttgtgaggcggctgtgccacgatcatcacagcgtaatacggcgattccgttcctcgtcagatagtcggcgatgactaggaaaggcttgtgtcccatgatctcctcatcccggttctgcgcaccgcttcctgttaccaacactactgccggaaatttatttcccttttcgggaagagttaatgtccccgcaaggttaattccgtcctgttcgtttctcactgtaacttcttcacttttataagggaaaggtggttgaggttcctgcggacgtttgggacggcttgcttctcccttttccaggttcaatgggataggcattccttgtgtgaatgttccggttatcgttttatcacttttcaattttcctttgtaggaagcatgaataataggtatctgaatagttaatatggaatcactgaaagaggtagcttgtgtctttatgccgttggctccctggtcgggactgtcgagcgttgttacataagttccttgagccgcttggttgatatggaatacgatagtcagcgacccggtgggaacagtcagttttccgtgccaagttcctgagatatcttgcgcggatgcggaagaagataagaacagtccggtgaataatccggtgataatagtagctatgtagacagttttcaatgtgttcataagagagagattaatagtgaatgtaattgatgcatatcagatgattcgtacaaagataacgattattctgacataaaaaataagacattactcaatcttgttttaagtcgagtaatatcaggataatttatgagatttgttaatgaaggctgcctttattttgctgtcaatggactaaaaggctatctttgtttttatttaatagattaatatttgataaatatgaagatgtgtagtgaagtctttcagtttgaaaaggaactgaagtgggagaacccgggtccgggaatccgtcgtcagataatgggttatgacgaacagttgatgatggtaaaagtgcagtttgaaaaaggagctgtcggtacaatgcacgaacatcatcacagtcaggctacttatgtggtaagtggaaagttcgaattaacgattggcgaacagaaagaaatactatcggcaggagatggctattatgtggctcctaataaacctcatggctgtgtttgtctcgaagcaggcgtgctgattgacacatttactccgatgcgggcagattttctgtaagacagatgtggtatgaaattaccacatctgtggtatttcgcctgaacagaatccgcgctatctttgtcatatattaaaacgtatgaatttaaaacggatatatatggagaagatagcaagaaaattgacggacctggttggtaacactccgttgttggaacttagtaattataataagagtaagaatttgaaagctcgcctggtagtgaagcttgaatattttaaccctgccggaagcgttaaagaccgtattgctttggcgatgattgaagacgctgaggtaaaaggtgttttgcaagcgggagctactattatagaaccgactagtggcaacaccggagtaggactggcttttgtggctgctgccaaaggttataagttgatattgacaatgcccgacacgatgagtgttgaacgccgcaatcttttgaaagctttgggagcagaattggtcctgactcccggtgcggatggtatgaaaggagcaattgccaaagcggaagaactgaaagcggcaactccggactctgttatcttacaacaatttgaaaatcctgctaaccccgccatgcatttacgtactaccggcctggaaatatggagagataccgaggggaaagtcgatatctttgtggccggcgtgggtactggcgggacagttagcggagtaggtgaagcattgaagatgcgcgaccccagtgtgagggtggtagcggtagaaccgtctgattcgccggttctttccggaggaaagcctgggcctcataagattcagggaatcggtgcgggtttcattccgaagacttacaaggcttccgtcgtagatgaaattattcgggtgcagaatgatgatgccattcgtacaagccgtgaactggcgaagctggaaggattgctggtcggcatatcttcgggtgctgctgtttatgcggcgacagaactggcaaaacgcccggaaaatgaagggaagatgattgtggcgttgctgcccgatacaggcgaacgttatttgtctactattttgtatgcttttgaggaatatcctttatgatacactgaattttagaaaaaagagagagaataatcgggtggttatttggcaaaatcgtatatttgccaagtaaccatttttatttaatactatgttaaacaatactttagggattttagtaactattctcttactattttccgcctgtaaagacgaagaaccctcaatctcttcaacgaaggaattgctgaacttttctattttgaaaagtgataatcaaggtaaggtcgcaaatgatgtggaagcctctattcaggggagtgtgattacattgccattggataagtatgatgatttgaaatcattaattgccgtattcgaatataatggaaaatccatcacgatagatggagttgagcaggaatccggagttacctcaaatgattattcgcagccattggtttttactgtggaagcagaagatggcagtaaacagcaatatacagtggaaattgcattgaaagataccggagtgctttctgctttccgctttttgaaaaagaataatgcattcttgactgctgatgtttcctcttctattggagaagaaagtataataccccttgttacattctcacaatccgagcttatccctacatttaccacgaatgctgtaaaagtactggtgggcgaggtagaacagaaaagtggaatgacaaagaatgatttttcatctcccgtagtttatcagtttataatgagaaatggggagacttttcaatatacagtaaaggctgaattcttattatctgctattcctgaattgactattacgacgacagatccgtctatagcggaaataccaagtaaggattattatctggagggtactttggctgttaacggtagagggggctatgaggattatacagggaaaaccgaggtgaagggacgtggcaattcaacgtggggatatcctaaaaagccttatcgactgaaacttaataagaaagcagagatctgtggtttggggaaagccaagaattatgtgttgttggcaaatcatcttgatcctacattaatgcttaactcggttgcattcaagataggtcggctgctggaacttccttttaccaatcatgcaattcctgtagatgtggttttaaacggaatttataaaggttcttacttgttgaccgaacagatagaggttaaagaaaaccgtgtagatttggatgaaaacaacagtgtcatgtgggaacttgattcttattgggatgatgagcctaagtttaaatcgactgcatttaaccttcctgtaatggtgaaagaccctgatttgaccacagagcaatttgaatattggaagaaggactttaatgcattcacgacacaatttgcaaaagaaccgttagaaggaaatagctatgtagacatgattgatattgaatcggttgccaaatttctgataacctttaacttggtacacaacatggagataaatcatcctaaaagtgtttttctccataaagaaggaaatggcaagtatgtaatgggacctatctgggattttgattgggcgtatgattatgaaggtacgagtaatcattttggacgttacaacacaccgttattttcaagtagcatgaatggagtcggtacggcatttttccaacgctttctacaagatagccgtgtgaaagcgatatataagagaacttggcaagatttcaagaataataagctagatgcattgttacaatatgtagatgattatgctgtaatgcttaaaccctctgtggaaaggaatagtgaattatgggaaaatactcgttcattcgatacaaaagtgaaagagttgaagacgtggttaaggaatagagcagactatatagatagtgaagtcagtaaactttaatagaatcaatctgttgaactgatagatgaaaatagaaatctgaagaaccggtaataatttctgtttcactttttagtgaggaaaacaaaattattaccggttcttatggatttatattattgattggggtttattgcacttcaaaacttcctttcaaccgtatatcttgtgatgaagctcctatcattattgaaaaactacccggttctaccgtaaactgattgttcttgtcccataaccccaagtcttgaggagtaagggtaaagctgattgtctgttcttctcccggttgcaaatgaatacgttcgaagccacgtaacaccttgtcgtaggtagtcacactgctgaaatcatcccgaatataaagctgaactacttcatctccagctcttttcccggtattctttacgatacacgaaagggtcatgttttcttgtggacctataaccggtttggagatcttcaaggctgaatattcaaaagtagtgtaacttaacccatatccgaaaggataaagaactccgtctacacggactctcccctttgaatcggagccgggtttgaatggaaatgcaaatggaacctgtcctactgacttcgggaaagttacagccaggcgaccgcccggattgtaatctccgaaaaggactttagcaatagcattccccataaattcaccggggaaccaggcatgcacaatagcgggaacgtatttgttggcccagttgattgttgctgcccttccgtctaccattaccaaaactactggctttcctgttgcatatacagcttccagcaattgctgctgacgcccgcagagatcgaggctggtacgggaaaattcctcccgaaccgtcttctcatttccgcctaatacaagaatagcgatgtccgaaacttttgccagttctactgcttcattaatcatagcttgttcctgtgtatccaaaggaacattgtataattcactttctgggaaatacttgtcaatgatgttacatccctttgcatagctgacttctgcattaggcagatattctttgattccctgatatacagtcttgataggagcatgggcagggccgtatctgcacgtcagttccttcacttcttctgcattcggaccgataactgctattttgttgaggctcttggacaacggaagcatctgattctcgtttttcagaagaacaatagactctaaagccgctttcatagatacctcctgatgagcggcattgtgtactactgtttctggatgacgatcatcacctgggtacggattatcaaaaagccccaacataaatttgacacgtaagatttcacctacacgttggtcgagggtatgcaaagagatttttccttcgctgattgcacggcgtaaagggaggataaaatcttgtggcggggtgaagttggtgcggatattcagtcctgcatttactacttgtgccgccatttcttcttcagtcggggtaatgcggtgttttgtatgcaggaattccactgcttcactgtccgatactacatatcccttgaacccccattgttgacgcagaatttcagtaaggaaatgataactcccggagacgggttctccgtcataatcattataagagctcattacccctaaggctcctgcttcctgaattcctttgcggaagggttccaaataaagagtcttcatctcacgcggagccacgtgcgggtcggtacgtgtacctccatcacgtcctccaaccgggatactatagacggcaaaatgtttcggagtggctgccagtccttcggcttgcagaccgagaatcatttgttttcccagttcgcctgccagataaggatcttcgccataactctctactacccgtccccagcgcgggtcttgggcaatgtccagaatcggggcgtaaatattggtatatccgagcgcttttgcctcatcagcagtgactttcgcaatttctcggatcagtttcttgttccacgtggcaccttgtccgcattgggcaggaaacatggtagcccgattgtggcacaatccgcgtattccttcattggtaaagtcaacgggaatgcccaaccgtgtctgttctacaaaccagcgttgtatttcgtggcggttctttacactgttggcatacggataagaaagctcggaaccgaatttacccaatccgttcgcctgttcgtcaatattcccgataccgtctttccagatttcctttgaccattcggcagtgggccatgcatctttcaatacccgccccgaaccgtataaagtagccatttggcaggttttctcttccagcgtcatttgcgacagcaaatccgcaacacgggcttcaataggagcggcagggtcttcgtatacgtccttgactccgttcttattaaagtcaatccaattcttcttgtatatgtcttttgtactgccggcaaagatgttgccgacagacagacacaaggtaagtccacatactaattttttcatatctatggcttttcatcagctcgcaggccgaatacttttcccgtcatccggtctaccggtactttccatactttaacattacggacagccggatcggagtaattaaattcattattcgtataatgacacatgataatgtccaatgcgccacgtttttcttccatgtcttcaacgaactctacttttccgcgacacatcgcactttcagaacgcatactgtaactgcaagccactttttcgtgctgatagacaagcttgtgtccgagactaaaagtgatacagacattattattgtgttccaacatttccactttactgccttcgggcccggagtggagatagataatgccgtcttcataaccgaagttcatcggaactacgtatggattaccttccatatcgactatacctacaaaacaaacgtcacaatgaagaataatagactcgattctttgtttgtcttcgatgataaaggttttcataatggttgttagcttcccctttgtggtgaacttatttttctattaattcaaaatccaattgtttcttctcaaggttggcacgtgctacgcgaacggtaatagcatctcccagactatatatcttgtttttacgacgtccgcgaaggcaatagttcttctcgtcaaattcgtaataatcatcatccagatcgcggatgggcaccaaaccttcacatttattttcgttcagttctacgtagagtccccattcggttacaccggagattacgccatcgtaaatctgccccaagcgttcgctcataaattctacctgtttatatttgatagaagcgcgttcagcgttggcagctatttgctccatgttcgaactgtggtcgcagaggtcttcgtatttggcttctgatacgctgcgtcctccgtttatgtacttcgtcaacagacgatgtaccatcatatccgggaaacggcggatcggtgaggtgaagtgagtgtaatattcgaatgccagtccgtagtggccgatgttatgcgtagagtaacgcgctttctgcatggcacggatagaaactgtttcaatcagattctcttctttcttaccatgaatatcgtccagaaggtggttaatagactttgaaatatctgtttttgtaccgcttgtacgtactttatagccgaaacgggcgatgaactgcgacaagttttccagcttttccgggtcgggcaggtcgtggatacggtaagggagcactttggctttcttattcttcggcacacgtcctaccttttcggctacggttctgttggcaagcaacataaattcttctaccagcttattggcgtcttttgactccttgaagtaaacgctgataggtttccctttctcatcgatctcgaacttcacttcgtaacggtcgaagttgatagctcctgctgagaaacgtttttcgcgaagtgctttggcgatagtatccagtgtgagtacttcttccttgaagtctccttcttttgtctcgataatttgctgtgcctcttcgtaagtaaagcggcggtcggagttgataaccgtatgaacgatgcgtgaatccttgacttcacctttttcggtaatattgaagattacggagaaagccagcttttcttcattcgggcggagggaacagatgaagttacacaatcgttcgggaagcatcggaatggtgcggtccaccagatagacggaagtggcgcgtttttctgcctctttgtcaatgattcctccttctttcacgtaatgcgtcacatcggcgatgtgtacacctacttcccacaatccttctttcaatttgcggatagaaagtgcatcgtcgaagtctttggcatctttcgggtcaatagtgaaagtggtaactttgcggaagtcctcacgtttggcaatctcttcggctgaaatttcggcgggaatcttgtctgccgctgtctctaccgacttcggatagacataaggcaaaccgaattcggcaagaatggcgtgcatctccgtagtgttttcaccggctttgccaagtatatcaatgacttgtccgataggattttttgccttgtccggccattcggtcactttcacaattgctttgtctccggttttaccacctttcagcttttctttcgggataaagatgtcattggcaagtgtacggttttccgtcaccagaaaagcatacgacttggctacttccagtgtaccgacaaatgtatcgttggcacgttccagtatttctattacttccccttcggcatccttgtttttacgtttggcgtagaaggtgatctttactttgtcgttgttcatcgcatgggccgagttgcgttcggccacaaagataggatcgccccctccttcggggatgaaggaattctttccgttacttttccgttggaaggtgccggtcatctctgttccatgattgttgagacggaactttcccttttctatttcgctgatatagtcatcatccagcatttcgtgaagaatatcgacgcatagcattttctgcgggtgagtggtgagatgtaactctgagaaaatatatttcatgctcagcgtctcgctttgtttggcatggaaaaagtctatcaatagcgcggctaactgttttttactcattctcttgccggctttcttctctttcttttctttctttttcgccataatgtagtcttttaaaaatatctagttacaaagatataggaatattttccttatcgaaactttgaggaaagaaaaataactttgcagtcttgtatttgattttccgtaataggtcaggttggttctgataaggtatattacaaagttggggataactcataattttatcgttgtatttaagtggtatttaaagggtatcggggtttttcaacgggttgagtgcgacaaataataattgagaaaagcaaaatggcttttgttttatatttattgtatctttgtggcattatcaagaaaatgtttagtgaggtacttttattaatattcacgcagaacctagagagtaataatggagagtgttttaattacgggcgcaagcggttttataggaagtttcatcgtagaggaagcgttgaaacgaaggtttggtgtgtgggcagggattcgttctacgagcagtaagaaatatttaaaaaaccggaagattcattttctggaactggactttgcgcatcctaatgaacttcgtgcccaactctccgggcataaaggtacttataacaagtttgattatatcattcattgtgccggtgtcaccaaatgctctgacaaaaagacttttgattatgtcaattatctccagactaaatattttatagacacgctgaaagcgttgaatatggttccgaagcagtttatatatatcagcacgttgagtgtattcggtcctgtacgtgagaaggattatactccgattgaggcggatgatactccggcgcccaatacggcttatgggttcagtaaactgaaagcggaactgtatattcagagtattcccggttttccttatgtcatttatcgtcctacgggagtttacggacctcgtgaaacagattatttccttatggcgaaatctattcagaagcatgttgatttctcggtgggtttccggcgtcaagaccttacttttgtttatgtgaaagacattgtgcaagctattttcctgggaatagagaaaaatgttacccgtagaacgtatttcctgacagacgggaatgtgtataagagtcgtgcgttttcggacctgatacaaaaagaattgggtaatccgtttgttcttcatctgaaatgtccgttaattgtgctaaaagttatatctttgctcgctgaatttattgctacacgttccggaaagagcagtacactaaattcggataaatataagataatgaaacaacgcaattggcaatgtgacatcatcccgacaattaatgaactgggatatgcgcccgaatatgatttggaaaagggagtccatgaaaccattgcctggtataaaaacgaaggatggctttagacttatttaagcgagtagaaacccggaaagggttgtttgctgtggagaagattacattgatttataatctgttgacctctattttgattctattcctgtttcagcgaatggatcatccatggcacatgttgctggatagggctatgattgctgcaatgacttttctgttgatgtatctctaccggcttgctccctgtaagttttcggcgtttgtacgcatcgtcattcagatgagcctgctttcttactggtatccggatactttcgagttcaaccggttctttccgaatctggatcatgtcttcgctatcaccgaacagtttatttttaatgggcaacctgctatctggttttgtcatacgttcccgcatcttctggtcagtgaggcgttcaatatgggatatttcttctattatccgatgatgttgattgtggcgttattctatttcatttataggttcgagtggtttgaaaagatgtcttttgtgcttgtcacttccttctttatctattatctgatatatatattcgtacctgttgcaggacctcaattctattttcctgccattggatttgataatgtttctaaaggaatttttccggctatcggtgattatttcaatcatcatcaggaattgcttcccggtccgggctatcagcatgggttcttttatagtttagtggaaggctcccaacaagtgggcgaacggcctacggccgcatttccaagttcgcatgtcggcatttctaccattctgatgattatggcatggcggggcagtaagaagctgtttgcttgcctgatacctttctatatgctgctttgtggagctactgtatatattcaggctcattatgtcattgatgctattgtaggctttttctccgcattcttgttgtatgtggtggtaacttggatgtttaaaaagtggtttgcgcaaccgatgttcaaataaaatagcattgctccataatactatcttcaaggatgcaatgctataaatatcgtatttaatttttcgggctactttctctgttggtgagtatttcattaaatatctgaaacagctcctctttggtctcggcacgtaacatagcgatgcgggtgtcacggaaattagggattcctttgaataacgggcttgcagccaagtgacggcgcacgtgcaagatacctttgcgttcgtcgagtaggtttacactgtcaatcacttcctggcggaggacttccatacaccattcaaaacttagtggcggcagttcctcgcctgtctccagataatgcttcatctctttaaatatccatggacggccgaagctggcacggcctatcataacagcgtccactccataacggtcgaaacactccttgcagcgttgaggcgttgtcacatccccgttgccgatgatcgggatatgcatccgcggattattttttacttctcctatcagcgtccagtccgcttctccggtgtacatttgtgcacgggtacgaccgtgtatggttaatgcggcaataccgcaatcctgtaactgttctgccagctctacgataattttgttgttggcgtcccaccccagacgggttttcaccgttacggggatttttaccgcatccactacagcacgggtaatctccagcatttgagggatattctgcaacattcctgctccggcaccctttccggccactcttttcaccgggcatccgaagttaatatccaaaatatcaggctgtgcctgttccacaatctttgcggcttccaccatggtttccgtatctttgccgtatatctgaatggcgacgggacgttcttcatcactgatgtttaacttctgcgctgtcttgctgacagcacgtatcagtgcgtcactcgatacaaattcagtatataccatgtccgctccgaactttttgcacatcaggcggaaagccgggtcggtcacgtcttccatgggagcaagcaggataggatgttttcccaagtctatatggttaatcttcatatacgattttgttatttgctgtttatgattgaagtaacttcttcttttcgctgcaaaaatacggaaaaaagcctacctttgtacgcattcatttgcttaactgatacaaataagtatatattctatgagtcttagtttgaaagattttgaaattatggctcctgtaggttcgcgcgaatctctagctgcggccattcaggcaggtgccgattctatctatttcggtatagaaaacttgaatatgcgtgcccgttcggccaatacgttcacgattgatgacttgcgggaaatagcccgcacgtgcgatgagcacgggatgaaaagctacctgacggtgaacaccattatctatgataaagatattcctttaatgcatacgattgtcgatgcggctaaggaagcgggaatttcggctgtgattgcggctgatgttgcagtgatggactatgcccgccggatagggcaggaggtgcatctttccacccagctgaatatctccaatgcagaagcgttgaaattctatgcccggtttgctgatgtagtggtactggcccgtgaattgaatctggaacaggtagcggagatttaccggcagatacaggaagaacatatctgcggtccgagtggcgaacagcttcgtattgaaatgttctgtcatggtgcgctctgtatggctgtttcgggtaaatgctatctttctttgcatgagatgaaccattctgccaaccggggtgcttgtatgcaggtgtgtcgtcgttcttataccgttcgtgataaggaaacggatgtggaattggatattgataacgaatatatcatgtcgccgaaagacctgaaaactattcattttatgaataagatgttggatgcaggtgtgcgtgtgttcaagattgaaggtcgtgcccgtggacctgagtatgtgcgcacagtggtggaatgctacaaagaagctatcaaagcctatctggaagatacctttactgatgaaaagattgcagcatgggatgaacgcctgaagaccgttttcaaccgtggtttctgggacggctactatctcggacagcgtttgggagaatggacccgcaattatggatcggcggcaacggaacgtaagatttacgtgggaaaagggatcaaatacttctctaacatcggagtctccgagtttttggttgaagctgccgaggttagcgtaggcgacaaactgttgattacaggaccgactaccggcgctgtttttatgacattggatgaagcgcgtgttgatctggaaccggtgcagaccgtaaagaaagggcagcatttctctatgaagtcggataagatacgtccgagcgacaaactgtataaactggtatctaccgaagaactgaaaaagtttaaagggctggatatcgaacagaaaagaggctagctccggtcattattctctaatctttaattcacgataaatgaactatatctatgaattggaaatgaaggtgcgtgattatgaatgcgaccttcaaggtattgtcaataatgccaactatcagcattatctggaacatactcggcatgaatttctgacctcggtcggcgttagctttgcagcgcttcatgagcagggagtcgatcccgtagtagcacgtatcaatatggctttcaaaactccgttgaagagtggagatgaatttgtatccaagctatatatgaagaaagaaggcattaagtatgtgttctatcaggatattttccggaaaagtgataataaagtagtagtgaaatccactgttgaaacggtatgtgtagtaaatggacgtttgagtgacagcgaattgtttgataacgtctttgcaccttacctgaaatgaatagctccgaagaagaacaaatttatagtattgctttgacaatggtgcctggtatcgggcatattggagcgaaacatttgatggacgaggcgggaagtgccgggttcatattccataatcgcgaggcacttcttgaatgtgtttcgggaataagtcggcgtgtagtgaatgcgttggattgcccgcaagccattgaccgtgcgaagcaggaatttgattttgttcagaagaataatattcgttgcctgaccataaccgacgaggagtatccttcccgattgagagagtgtgaggatgctcccgttgttcttttcttcaaaggaaatacagatttgaatgccctccgtgtcgttaatatggtaggtactcgtcatgccactgattatggaacccgtatctgtgcttcttttttgcacgatctgaaagtactgtgccctgatgtcttggtagtcagtggcttggcttatggaatcgatataaacgctcatcgtgcagcattagccaatcagctttctacggtaggagttcttgcccatggcttggatcgcatctatccctatgtgcatcgaaagacagctattgatatgcttgataatggtgggctgttaactgaattcctgaccggaacgaatcccgaccgccataactttgtcagccgcaaccgtatcgttgccggtatgtgtgacgctacaattgttattgagtctgccgagaagggtggttcgttaatcactgccgaacttgccgaaggctatcaccgggactgctttgctttcccgggacgcctgaatgatgaatattccaaaggctgtaaccaactgattcgggataataaggcttctttacttctttcggcagaagactttgtatcggcaatgggttgggatattgctgctcatccggcgaaagtggaaaatgtgcaacgcagtcttttccttgacttatccgaggacgagcaaaaggtggttgatattctggagaaacaaggagatttacagattaatacattagttgttgaagcagatattcctgtacagaaaatgaatgcaattcttttcgaacttgaaatgaaaggtgtaattcgtgtattggtgggaggaatgtatcaattattagcttagtttatcataaacataaaaaaaggagcaacgctttgctccaacctttgttaaccttaaatctaatactatgaaaaaaatcacatgacaaatgtaagccttcattgtatttcttccaaataattctattgcatttgtttctcttttaaattctttcactgattttcactgttatcggacacgatgcacttctatcccacttattggaaggtttttgagtatttcaacgagtaatttttctcataaaaaaataggattttttttaatctttgaatatttaaagtatatttgcgctatgtctatagaaaatgaaaagcatggctgcctctagtgaaatggatgatattgctttgtggggccttttgataaaaggcgatcaaaaagcattggaaatactttatcaaagatattattctcttctgttgaattatggtttgagatgcagtacagataaagaattggtcaaagattgtatccaggatctttttataagcttatatcagaatactcacattaatgtgacaaacataacagtccgttcttatctattaaaagctttaagaaataatctcacctataaattagcaactaataaagaagcggattcattagatgactcagtttttcatattccgctcaatgaagatctatttgaacagttatttcctaagaatgatcatgatctgcaactggcccgtcgtcttttggtggcaatctcacagttatctccgaatcaaaaaacagttctttatttacgttacgtgcaggaactctcatataaggaaatagcggatgttatggatatgaacatacaatcgtctatgaatttgtctagccgggctttaactaaactgcgcactctagtaactcaagatgaatactttttgggtgtatggcaattgttttttcttaaaataatattatctctttgaaagggaaaaaatattttctttgtaatttgttgattattatatagatatatcctttttctgactctattgtttttttctgcaaaaaaaatgctgtaaaagtgagtaggtttttcttttaattccattctaattataaaagaggataaaaatgaaatatagtaaaatagatatcaggaatactgtacgcaatcttatagattatttcaagatgcaaaacgaagttccttctcaaaaggaaatagttgaagtatggagtaaaataaaagaaggagttgaaaagaaaaaacaaagaaggaaagagcgatatatacttgtggcaattacttctgcagctgcttttatagggtgtatatggttgggaattgaatggtattcttttaataataagtcggatatttccgtgatagcagcacaaatgtctaatgaatctatagaaggagaggatattcgtttgattgtctctgagaaagaagttcatcatgtaaagaaaggggctacagtagcttattcacaagagggaattgtgagtgtagatgaagaaaaggtatctaagaatactacaaaagatttatacgaccagattattgttcctaaaggtaaatatacccgtttgattcttgctgatggttctagtttgcatataaatgcgggtacgaaagtgatttatcctaaacgttttgagaaaaacagacgtgaaatctttgtagatggagaaatttttattgatgtgaaacgagatgaatcagctccttttattgtgaaaacggcacaatttgacgtacaagtattagggactgcttttgatataaaggcttatagcggcacatttgaaaatgcagaagttgttttagtacgtggtaaagtaaatgtgaaaagcaaatcgggtaaggaactggttctttcacctgataataaagctacaatattgtctgatggtctgattgaagagtcttcagtaaatgcagaagaatatgtactttggactgaaggaatattgtctctgaataatgatccgttgaatgtaattttagccaaactgggtcgatattatggagttgatattgattgtacagatgatatttcaactataaagatagcaggtaaaatagacttggagtgtggcatagaagcagcattaaaaagaatatctgctacaggaggattctctttcttgaagcaagagggtgcctacacgctaaagcctctggagaaaattgtacaatagattttgaaaccgaatgtttaatcttaaaaatgaatacgtatgataacatgaaaagatttgtctaattagaaaatccgagtaatactgctaatattacccggataaagtgaaaaacaccgagttactggtattatatcaatcttacaaaattatggaaaaaaagttgaaaaacgcaatcataatgaatcgattaacgaaaattatgtttgtactgggatttctattgacttcagtgtggagttattcgagcaattccgtatatgcacaaaatcaaaaattctcttttgaatttaaacaaacctctattaaaacgatttttcaatacattgaaaaacatagtgagtttatatttatgtatcgtacagatctgctcgatacatctaagaaagtctctgtgaaagtagaaaaacagagtatagaacagatacttgagcaagtgctgaaaggaacatctgttgtatatgaaataaatgatcggcagattgtcctaaagaaaggattggaacggtcggaagaagttcctcagcagtcaaggcagaacaaactgattcagggacttgtcaaagacgataaaggagatgttattatcggtgcgactatcaaagtaaaaggaacaaccataggtactactaccaatatggatgggctttataatttgtcggttccatcagaaaattcaattttgatagtttcttacattggttacgctacacaggaaataaaagtaggaaaccgccagaatattattattacattacaagaagatgccaaaaacttagaggaagttgtggttacagcatacggaaccggacagaaaaaggctagtatggtaggttcagtacaatctatacgaccggccgatctgaaagttcctgcgtctaatctttccacttcttttgccggacgtttggccggtgtgattgctgtgcaacgtagtggtgaaccgggagctgatggcgctaacttttggattcgtggtgtctctacacttggtagtgcaagtacttctccgctgatcattattgatggtattgaatcaactacaactgacttgaatgctcttgacccggaagtcattgatggattctcaattctgaaggatgcaacagcaactgcaatgtatggtatgcgtggtgctaatggtgtgatgattgtgacgactaagtctggcgctgctttggataaaccgattattaattttcgtatggaagccagcatgtctacgcctaccagcatacctgagtttgtagatggcgttacttttatggaactttataatgaggctgtacgtaatcagccggcaggaaaagaagcttatacacaagaacgtattgacggaacccgccaaggcctgaatccttatattttcccgaatgttgactggtatggtgagatgtttaaggaccgttcgttcagtgaaacattcaattttaatattcggggtggtggtaaaaaggtggattatttttccagcatctctgtagggcatgagagtggtatgctgaaaagtcgttctaaagatttcttttcattcgataacaatatcagtcgaatgcgctattcttttcagaacaatatcaatgcacgtttgggtaaaacatccaaattatctttgagattgaacgtaatgttggtagataaacgtggtccgaatgaaagtacaagtagtttgttctctagcgtaatgaatacaaatcctgtagatgctccgattatgtttccggatgatggaacaacttcttatattaaatggggagtacctacgaatactgcagtaaatccattagcgacaatggtaaatggatatgatgatacgtttcagagtacggtaacagcttcattgaattttgaccaaaaattggatttcttggtggatggtttgacttttaaggctatggcttctttaaagaatttcagccaatctgttcagacccgatattctgattggaataagtttactgttaataactggtctctcaatgatgatggtacctataatatggaggtgattcaggaaggtgctgaagtaggaactgagcttaaaacaaaaagtagcaatactggtgatcggcgtatttacttacaagcgatgttagaatacaatcgtacattcggaaagcatgatgtgggggctttgctgatttataatcaggatgaatatatgaataataatccgggaacagacttattagtggctcttccgactcgtcgtcaaggaattgcagccagagcatcgtatgcatacgatggacgttatttggctgaagtaaacttgggatacaacggctctgaaaattttgcgaaggggaatcgtttcggtctctttccttctatagctgtcggatataatattagtgaagaaaaattctttcaaccattgagaaacgtaatttccagaatgaaagtcagagcttcgtacggattagttggtaatggtaatattggcggacaacgttttgcctatttagctgatgttgatttaacgggaagtcctgcttttacgactggcattaatatggacaggacattgacaggcccgtcatataaacgttttgccaattatgatttaggttgggaagttggaaagaagtataatattggattggatatgacattgtttaataatctaaatttgacggtggatgtatttcgtgaagaccgaacagatattttccagacgaaggcgactattccttcttatttaggagtatacgggactagctactatgtaaatagtgcagccgtacggaatcaaggaattgacgcttctattgatttcggtcatcagttcaacaaagactttagtatgacattcaaaggaacattcacctatgcacacaatgagatcagggcatacgaagaatctgtaggagatcgtgctaatctttccagaattggttacagtacctctcaacaatggggatacgtatctgattatctgtttgctgatcaggctgagataaataatcacccgtcccagttgattggaggtactgttggcccgggtgacataaaatatgtcaatcagcctaatgtatatggagtatatgatgatattattgataaaaatgacatggtgcctattggcaatccgactactcctgaaattgtttacggatttggaccgtcatttcattataaaggttttgatttatctttcttctttcagggagtggccaagacttctttgtttatgagtggtctgcaacctttcggcacaatgacagataacaagaacgtacagacattcattgccgatgacagatggagtcctgaaaatcaaaacatatttgcgaaatatccacgtttaactattgagagaagtgctaataattctgcgacttctacatattgggagcgagatggtgctttcttgaaattgaagaatgcagaaattggatatacctttaaatctatgcgcttatacttacgcggttctaatttgctgactttctccaagtttaaattatgggatcccgaacaaggtggtggtaatggactaaaatacccgacccaacgtgtatttaatattggttttcagatgactataaaataacctttaaatataatagatatgaaacttattgataaatacttgatacttctatgtgtctttgtatgttgctcttgtaattatctggatattgtgcctgatgagaaacctacagaagaagatgcattcaagaatcctcagttaactgaacgttatctttattcttgctattcttatattcccgatcccagagacggttcttacagtttggatttgatgacgggggatgatgttgtcactccttgggagcatgaaacgttcggaaaatttgcacaaggtaattatacaccaagcaatccttatattaattattggcacgatttgtttaaaggcatccgccaatgttatttgcttaaagagaatttgggaagcgtgccagggctgagtgacgaattgaaagctgcttatgatgcggaagcagatttcttaattgctttctatcatttttttcttttacgtacctacggtcccgcagtcttggtgaaagaacttccggatgttacatcctctgattctccggaagcactgttaggacgaaattcgtatgatgagtgcgtggcatgggttacggatcaattgaagaatgtggcgggacgcttgccgatgcgccgtacgggaattgattatggaagagctactggtgtggcagctatggctatccgtgcacgactgttgctgtatgcggcttcaccgcaattcaatggtggcgaacaatttaaatctttatatgctgattttaagaatccggatggaactcagttaatcagtaccacttacgacccaaacaaatgggtgatagctgctcaagcttgtaaggaggcaatagactgggctagggagccggaggcaaactatgacttgtatgaagctaacgtaaactctttgcctaactatcccgaaccgacagatttgacacaacgttctttacgttttacgtttgttgataaagacaatactccggaggtaatttgggcattctgcaaaaaggaaagttataattatggtcttcaaggtaagtctattcctcgtttaagtactactgcttacggtggcttggcgcctacattgaggcaaatagaacgcttctatactaaaaacggacttccgatagacgaagatccagcttacgattatcctaaccgctatgaagtggccaactttccggttgaagagaaggatataaatggagaaggagaaagtcttaagttgaacatgggcagagaacctcgcttttatgcttggattgcttttcacaacggctattatgaggtatcgggagaagatgatagagaagagttttcatatgcgccaaaatggaaaaggggaaaagataagaagtataagcaactggtacaatttatgaaacgacagaatatggggctgaccaacgataataagtatggaacgaaaaccggttatctgaataagaaaggtactcatccgggaacaagtgcctctaaatctactggctttaaagtgatagattatccgtggcctatggtccgcttggcagagctttatctaaactatgcagaagcttgtgtggaatgtaatgatttgacagaagcaaagaaatatttgaattatgtccgcgaaagagccggtatacctaaagtggaagtttcttgggatggaattgcagagcttacacaagataaattgagggaaatagttcatcaggaacgcttaatcgaactttatcttgaaaatcataatttctgggatatacgtcgctggggaatagcagagacgttaggtgaacagccgaaaggactttctgtccaggctacaactataacagaatttgccaaaccggtatcagtagatgtgcagcgtcgttttattccggctcattatttaatgccgcttcctatcagtgagattaataagaatcccaatatggtacaaaatccgggatatgacgaataattgttatacataaagattctataaaatgaaagtaataaaatatatactacccctcctcagtttaggattgatcgttgcagcatgtaattctgacgatgaagaaagtattgccgctactgaaattcagaacttaacaacacaaagtgctcccggttccattacgttaacatgggagtatgctggtgaagaagatgataatatgactcgtttggttgagatacgatattatgatccggctgtaaagaaaaatgtcaaaaagacagccagtagattcagtaactcatttacgatagataatgccctcaaaagatatggcgaatatgagttcgaggtacaaccttttagtacaacttttacgccaggagtgatacaacggatttctggagttgcagaacgagctccggttattgatgaaaaaacatctacggagttgactattacaattgataatttgactttgggagggtttaagcccgatggtgttactactattccgcagtctagttgtattggtgacaataatggtccggaacgcttgcttgataacaatactagtactttcttgaatactgcatattctggagtacctgcaggaacaacctactatttggatattgtatatccgaaatctcagaagtatttgaagttttcgtatataaatagaagtgctggtagttttccggcggagatagaatgttctgtcaaggtaaatgaagacgatgaatggactcaggtaaaaacattgacaacagtggccgacgggttacctgaagctgcatcagcggcatattcttctgatgtatatgaagctcctttcgagttcaattatcttcgttttcatgtaaagaagacccatacgggtaaagtgaatttctcaatggcggagtttcgtgtttacaatgtagaacactatttttatgatccggaagctaccgaagaataaatgggtctatagcatatctttaaggaggatgtatttaatacatcctccttactaaaacattcatattatatctatatcatgaaaaaaataatattctttttttttatgctattctctttatgcgcagtggtaagcgcctgttccgatgaaaatgataaaggaactagtactgctacattagaaatagttgaagaatttgtagatttcaaggagaatggagaatcgcaaacgattgtaattacgaccaatcaagcagaatggagcgctactgtagagagtaatggtaaggggtggtgcagaattcttcctgacattaatccggggaatcacaaacttactatctctgttacccccaatacgggaaaagaacagcggagcactattattaccgtaaaggcagcagagttatcggagaaaataactgtacgtcaattgggaacggataaaggtattttactttctcctatgatgaaaacttttactgcggaaggaggaaaaatagagtttacagtaacagcaaatgtagagtttgaaataataccgactgttgattggatcacattgccggtcactacccgcacggcagaatatgtgactacagatcatacatattttattcaacgtaataaaggggaaaagcgtacgggaactattacggtaaaagataaagcaagtgatttattttcagagttaattatatctcaagaggctttaggaggatatgaaagtggtgaatctaatattcaaggtgatctattagttccggtttccacaggtagtgcagtaaattctttgggtaaagtatctcagttggggtcttcaggttttcataggacttatgatggaagtaaagagaccggatatcattccaatacatcagaagatgcttttcctaataattggccgttgacattaacttttgaatttacggaacaacctagaattgattattgcgtttgtcattcagcgagtagtaatatattaaaaaaagcagagatatttgtatctactgaggcagaaccggaatacacaaagttaatggatgtcgacttatccggaagtactgtggcacttattaaatttcccaacccgattattaatccgaaagggattaaatttgaggttacagagtcatcgggtaaatatcttgtaataaaagaaatggagttttatcgtcagaatccggataattatgatcctcttaacttgtttacggatattacgtgttctgagttaaaaccaggagttaccgaaaaggatatagatgcatgccctgatccgcttttccgtaatgttgctttttatctctctataaataaatatccgcgtgattttcgtattcaggagtataaagcttatccacatccggaattattccgtaaagaaaacaagacaagtgctgaacacgacttactggataatccgactggaatttttgtaaataaaggaaaagaagtcgtagtattggtaggagacagtcatggatatcagctttcggctcgaatcttaaatttgaatgtacctggaggggatggatttagtaataactattcttatcctttgtcggaagggattaatcgttttatggcggatacagacggattggtctacatttattaccacactcctgagtataggaatgcattaccaataaagatacatatcccgtcaggacaagtaaacggatattttgactccggaaaacaccaaccttctgattggaaccgtttgttaaatgctgcagtaggaccgcattttgatgtgcttggtgagaaagctcatttgatctttccagtagacaagttcaaggcaaacactccggatggtaaggctttaatagatgcttatgacaggttggtattacttgagcaacaatttatggggctggaaaaatatgatcgaatggatccgaatcatgtttgtttttctgtcatgtataatgatagttatatgtattctgctgctaatcatacaggatatgttgctagcacaatgaacatgatgtgtgacattagccaatttatacaatcaatttggggaccggcacatgaggtcggacattctaatcagactaaaccggggttatgttggcatggaatgggagaggtgacaaataatattcactcactatatgtacaaacctcctttggaaatccctctcgcctacttgatttgtataatgggaaaacatataccatatatgagaaagggctatcagccttcttcacacaacgtcgtccgcatgttgtgaaagacgacaaggtggatgaattaaatcaattgattccattttggcaattgtatctgtacaccaaggctatggggaacgaggacttctataaggatttgtatgagttggtccgtactcgttcagataaggcgactccaggagaaagccagctggaatttactgttttagcttgtgaagcggcccaattagatttaaccaaattcttcacccgatggggctttttcgaaccggtagatattataaaaaatgattatggggaaaagcaatttgtagtgactgaagaaatggtcgatgatacccaaaagcgtattgctgcattcggattttcccaaccaacgaaagttgtggaatatatcaccgatgtcaatattgattgttatacaggtaatagtggcattataaaaggtactgctcaaagagaaggtcaaaaaattataatgatcaattggaggaatgtagcagtttacgaagtttattcggacggtaaattatgttttgtatctccagcctcctcttttactgtaaatggaaacttaggaactaaagttcaagtctttgcagtgtctgcaactggagaaaaagtagaagtaacattttaataattatattaattaataaagaacaacatgaaacatttttggacaggtttattagccttaggggtagtcggatgtactgcaccacaacaaacacaaaaggataatatatcgggaatttatcccaaactggctttttataataatgagggcgagtgcggaacaggtgctgtggttccttgggcaggtagtctatgggctatcacctatggacctcatttacctttcgggtcatctgataaactatatcagataactccggacaagaagatgactgtccgttcggaaagtattggaggaacacctgctaaccgactgattcataaggaatcaaaccaattgaatataggtccgtattttattaacgagtctggtaatgtcagagttttgccttggcaggaggctccgggacgatataccggttcggctcgtcatttgacagatcctgccaataagatttatattggcacgatggaagaaggtttctatgaaatagatgttaatgctttgaaagctaaggaattatataaagatagtaatgaagcatggcgtctatatcgtaaagactctaaaaatacccccaaacccgtagaattactgccgggagcgcatggtaaaggattgtattcaggacaaggagtgatggtattctcaaataacggagagaatagtgccgctgctatggagcattttgatgcgttatccggttcattatcagaatgggacggcaaagactggaaagtcgtacgtcgtaatcaatttgtagaattgaccggtcccggcggtatatacggtaacacaaatccggaaacggatcctatttgggctacaggctgggatcataaatcagtgctacttggagtaagagattcgcagaaaggatggaccttttatcgtttgcctaaagcaagtcattcttatgacggtgcacatggctggaatactgaatggccacgtattcgtaatgttggtacagatgatcaaccggattatctgatgactatgcacggtttattctggcattttccaaaaatgttcaccgctgataattctgccggtattcgtccccgttcaagttatttgaaagtgattggagactttgcccgttggaatgatgaattggtgtttggttgcgatgattctgcccaaaaagaatttttaaacaaacgtaaggcaaaaggaaatatagaaggtccggggcaatccaattcgaacctgtggttcacgtctttgactaaacctgatgaattaggacctgctacagtagatggagccatttgggagaaagaagaagtgcaagcaaatatttattcggatccttatatgtttgccggttgggagcaacgttgttgctggttgcaaaatgatggagggcaggatataacctttacgtttgaaatagatcagaaaggagataatgtttggaaggaactgactgctgtacaagtaaaagcagggcaatcggcttatctgccttttgctgccaaagagcagggcgaatgattcgtgtgaaaatagacaaggaaagtaatgtgtccgtaagtttcgtatatactacagttgatactcgttcttccgcttcttcttccatattcaacggattgtcaaaagtatcggaagaaaatactcttggaggattgttatacggccttggcaagaatagaagagctttaggtgtattagcttccaatattgaaaacggtaaagtaatagaaaacgggtattatgagatgagcgatactttggcattggtgcgtaaggatgatactcagactgccgattttattcgtgagaaatttgcgatacctcatcaggtagttactattgacgaatcatcggttctgatcgttgacgacagacaaagacgttggcgtttaccgttgggagacgaaaattacactaagttgattggacaggatgtggtacgtatttgtcgcgaagtggctacagaacgtgacttatttaattgtcatggtactttctatgaactacctgctgaaaatgcggatggttatgccaagattcgtccgattgcttctcataatttccggataaatgattatgcctcttaccggggaatgttagtgatgaccggtattgaccctaaaaaggataaagataatgaacatatcatcgtgtcggaagatggtaaagctgccgtatgggcaggtgccattgatgatttgtggagtatgggcaaaccgacaggcaaaggcggtccttggaaaaacactttagtaaaggcaggagaggtgtccgatccgtatctgatcggcttttatgataagaagaatttaaccttgtcacataattctcaaaaagatgtaacctttaccatagaaattgacccaacaggtaatgggaaatgggtgaattatactactttgactgtaaaacctggggagaagttggcttatgaattgaaagctccatttcaggcaagatggatacgcttctcgacagattctgatactaacgctactgcatggttggagtataaataaaaaatatatatgaaaaagattcgaataaatttatttattatttgccttttaggcgtattggcagaagtctgtgctcaagaaagtacatggcgggaaatgccttatttcttaaaaggatatgagaaacaatataaaaaatctccgaaagaagctgccttgtcatggtttaaagatgcccgttttggattatttgtacattgggggccggcttctttatacggacaaggcgagtgggtaatgtataataaccggattcccattaaggaatatgaacagaaagcccgggaattcaaaggagataagtttaatgctcaggattatgtgaatctggctttagatgcaaatatgaaatacattactttcgttattaagcatcatgatgggtttgcattatgggattcgaaagcatcagactataacagtgtgaagtatccttcgggaagagatttcttaaaggaactgtccattgcctgtaagaaagctggattaggtttatttatctattattctgtcgggctggattggcatcatccatattatattcctaatacgatgtatgatccggcacgtcctcattatacgaagactccggaggaatataaatactctaagccggaagactttaaacattatatgaactttgcaaaaacacagattatggaactttgtacgatgtatggtcctatagcgggtttttggtttgacacagtcggaggggtttatcaatattcggacctgttcaatatacaagaagtatatgatatgattcatgccatacagcctcatgcattagtagtgtttaaaacaggtgcaaatgggaatgaggactttattacaggagagcgtcactttggttctttggcaccggtgttcaagagtgtaggattacctaaaaaggtccaggatgctgctgactattcttggcaaaacaataaggctaaaccggctgaattgaatatcccgatacaaagtttaggttgggggtatcacagtagtcctaaacagcgtcagaagtcagcaaaagaggtaatggacttattggattattgtgctaaagtaaatgcaaacttattgctgaatatagggcctcgtccggatggaacgattttggaggagaatgtacgagtattaaaggaagtagggcggaaattaaaaaaagatggatttccgcggcttaatactaaagattatatgaagtaccgggatagtgccaaacaagaacgtccgaaagaaaaggagaaccaaacggctaattaggaaaagccttttgtaaagtaaataagaacgtaatggcagatatttgtagggaacactataatatctgccatttttataaactgattatttagaataaataaatatgataaagagagtctgttattttttagtatttggttattgttatctgtttctataacgaatgtataggcgtaaaaataatcaaacatcttttcaataggcaaaatttcattttcattgttcgttccggtctttacgtttgtgcagaatgggaaatgggaggtttatattttaggatcagatggcaaacctgtcagccgtgaatcatggaaagtgatatatgctgatagcgaagagacggaaaaaggtaattatacagcggataaagtttttgatttacaagagtctacctattggaaaactgtcgataaaatttcttatcctcaccaaattgttatagatttgggtgagaaacagaaaattacggatttccgttatttaccccgtgcagagaaaggtgctccgggacaaatcagaaagtataaaatatatatatcagacggttttaaactttagataataattagttatatcatgaaaacgaaaaagacattagcaatggtaggtatatttttgtttttagcaattagaccttctgttgcctcttcatttaccgaacggacttatttattgcccactagattggagggaagttgccggccggtgcttctgctgagtggaacttgggatttcaaatactctcccgaaagtcgctggacaagtattcaagtccccggtgaggcagctatgcaaggttttgccattgaacatgacaaaccatttttttataagaaagatttcacgatacccgctgattatgcaggcaaacggcttatattacggtttgatggggtatatagccatgccagattgagtgttaatggaaaatttgttcgtgaacatcatggtggctttacccgttgggagacggatattacttctttcgtacgtatcggaaagaagaatgagatacaactggcagtagtggatcggctagacgaaatttcgtatgcttccggatatgctcatcatcctataggtggtatccttcgtgacgtaaccttatttgcattgcccgaatcccatttatatgacataggtgtggagactcatcttgattctttatatcaagatgcagatttacgtttcttttgcaagttctccgggcaggaaagcacggaaatggagttgcgtttgaaagataagtccggaaagtatgtaccattgtcgcagtcccgttttgcattgtcggacggacaaaatattttttcgttacctgttaaaaatccgcttaaatgggatgcggaacatccaaatttgtatgaactggaaataattgtttttcagaatgggcaagaaacctctcggtttagtcgcaatatcggttttcgtgaagtcaagattataaaagaccgtatgctggtcaacggtcatcaggtgaaattgcgcggtgcctgccgccatgatattcatccaactttggggcgtaccactactttagagctggatagtctggatgcggtactgttcaaacaggctaatatgaactttgtccgtacctcgcattatcctcctactgaacgttttctggagttttgtgaccgttatgggatttatgtggaaagtgaaacggctgtttgttttgtagatacatatcgtcagaagaattataagcccggcaggtcgcaaaatgatccggcgtttgccgaacgttatttgggtcaatgccgggagatggtaaagagtcttcgttcccatccgtcaatcctgttttggagtattggtaatgaaagtgcttacggaagtaattttcagttatgttgggattggataaaggcgactgataccactcgccctgttatttttagttatccgggttcggctgtagaaaaaaaggcagaaatatttgatatcttaagtatgcattatcagaatgtatatggaaatgtagggcagtggggaatgtctacccgtaattttcagggacatggtattccggctttatttgacgaatgggcgcatccggcttgctatacatatgccacattacaaactgatcccaatatccgtgaattttgggggaaatctcttgatatgatgtggagtggattgtttaatgctccgggaggtctgggaggtgctatttggggatatgtggatgagactttctccttaccggaacctaaattcgggacttcattctggaaagaattcgcacgtactgccaagccgctggattatcaaggaaattgtgtgggatatggtgaatgggggattgttgatgtatggcgtcggcaaaaaccggagttctggtcaactaaaaaggcttattcacctgttcggttacttgtggaggataatctttcatttactaccggacaaaaattgatgttgactatacataaccgatttgaccatacaaatttgaatgaaattcatgctacctacacttatagaggtgtgacaaaatctttggaattgcaaccggtcgcacctcatacgaaaggtatgatagtcattcccgttgagcaatgggagaatggagaaactttgcaggtcgagttttttaccgctgctaatgagttgattgatgtgtatcgttttgtattgggaacggaaaagataatttacccttccttgctcgccggacaaaatttatccgtaacagatgaaggtgacaaagtgattgtacatggtaatggttttgaaatacctttcgataaagaaaccggattgattgtcaatgcaacagtaggaggggaagtaattattgaaaaaggtccgttcttgaacttgtatgtgaatttgaaccacttgacaggggctgaagtacgtaaaacggctaaccattttgccacttctgatattgattggaaaaagaaatcttttgattacagtcaacaaaaggacgaggtctgtatttctcttaccgggacttatcgggaagtgaatgttgattttgatataaaagtaacctcggctggtgaattgtctataaactatcggacagagggtgttcctaacggattcttacgtgaaacaggattatctttctatttacctcatagtatacatcagttaaattggaggcgcaaagggtactggaattattatcctgtaggagcatttgcaggaaatgagggtgaggcctcgctttacgaatcgcagcaaaagggatatggtgagaaacctgttcagtcctggcaggttgatacgcacaattattactattgggctgacgccggtgcgaattgtaaggaaccattaactcaaatggcaaaaggtatgaaagaaaatatttattattattcactttctactggggcagaaggtgagcatcaattatcagttatttctcaggatgcttcagtggcttgccgtataaacaagtgtgccaatgaacaattgatattatatgctaataatcgttgggattatcctgagatagcatgggggaattattgtaaaactttggaagtattgccttgttacggccggattgatataagggttaggtagtagggcattggaatttgtagaacaactatgaattattgaactttattgacgctgtatatgaataaataattaatgtgtaatttattggttatcaatagaatattattaatttcacgcttcgttaatcttcaacagcccgaatgacttgacaaacgcttttttatgttgtatatttgtagatataataacaacaataaaactacaatttaaaacttaaaaagtgaaatgagaagaatcttagcttttgccgaacttgccgtgatgtacttccccggatgtactaccagcaagaatgcggtacgttgtctcagccgatggattaaaggttgtaacccgttggtcaaagaacttatgccgacagggtatctgccctacaatcatcgctatctgacgatgaaacagtataagattataacaaaacacctaggtgatccttatgaggattagggtataaataacccgacaaagagcttaaggctgcaaacttttaggagttttgcagccttttttgttgcataaattcggtccggaagtgcttaaatgctatatgaaagtttataataaactgtcgacccgtttataataaacgatgaaggtttttattataaacttaagaatggtttttgcacaaatgataaactattttcaatagaagatgaatgggaaagcatagattctttttatttgtcattttataaagtaacttttggggacagtcttcgtatgaaaaaagaatacaagatattctttatattggcaatcataatattattttaggttttttgggggcattctcataattattttatggatgcaatcaaagagtttgtattatctattttagatttttgtcagttagacttaaccgattgagaaataaacttttagcgaactatttgagaagtagcggtaacgagttagcaaccgtgcgaatttcagcgttttgcgttgctatgctgtcaaataactctttcatttgcaaatatagggatttttttcgaaagtacgaactatcggtggcagttttataaaatcagctggcgaaaaaacaaatagaattttccaaaatagctttggataagccattaacgaaatactttcttttaagagcacagtggtttacccaataaaattatatacctttgtgacaagttaaagaagatgtcgcaatgaatcggataaaagaaacattgattgaggcgggtattagtcaaactgaattggctaaacggcttggtaaaggttttaacatggtcaatctatacgctacgaacagagtgtaaccgcctatacccgtactatacaggatagcggaaatactgaatgtggatgtgcgtacacttttgtacctaacgaaataaaaaaacagacatatggcaaatactaatctaaaggaagctaaggcggctaagaatgatgagttctatacgcaatttcatgacatagagattgaaatgaacgcctatcttgaatatgaccccgatgtgtttcgaggaaagattgtgcttcttccttgtgatgatccagaatggagcaactttacccgatactttgctgccaaattcgatgagttgggcttgaaaaaactgatttctacgagctatgcgccggatagcaaaaaatacaaaacgccttatcagccctctttgtttgagcaagaagcacctcagttcgacccgtccaaggcacaggtgaaaggtaagatattcatcttggaacgagacaaaagtggggacggacgtatcaatattgatgaccttgagtggaagtatatggaaggtgacggagatttccgaagcaaagaagttaccgagcttcgcaatgaagcggattttatcatcaccaatccgccattctccctgtttcgtgaattcttggcttggattgtggaagccgggaagaaatttgctgtaataggtaatatgaatgcaatcacttataaagaggtctttccactgataaaagataacaaagtttggttaggtgctacaggaaatggaaatgatatggtttttggtgttcctgaaggagctaaagtggatgagaaagacagggctaaagctgcaagattaggatatgtaggcaattataccagattgggcaattcatgttggtttaccagtattgaacatggtcgtcgtcacgagccattgtcactgatgagcatggcagacaacctccgcttttccaaacataaggaactgagaggcaaagctgcctatgaccgctacgataattatgatgccattgaagtaccttttacggacgccattccgtcagattatgaaggagtgatgggagttcctatctcatttctgattaaatattgtccggagcaatttgaaatcttagggataaccgataggcaaaacacatcttgcttaagaaccaagaaatacacgaatgttgacagccaaaatacaacgacttgaatgcgagaagcgttattaaagatggcagaagatatattcctatgtatgcccgattactcatccgtaaattataatctgatatgtctgataagtactcttgcatatacttgggtgtaatactttccgtcaactatataataagtctcattttgaggaactttagaatgaagcaataccgctccatcattaagtttcgtcactttggattctttcccatggtggtctatttgaatttgctcgggataaatcttagaagctattccataccaagttttagttatccctaagatttcaacttaaaaataaagacaaaatataatattatgactcagcataatgccatcaagctttttgaaaccaagaaagtgcgtactatttgggatgacaaagaagaaaaatggggcttttattactgtatctaattattagccatttagcaaaatggtgattcattcttgtgctttgtatgcctcataagaacattacaaatataactcttaattctgaaataaaacacatttccctatgatattttaatctatatgttctatttaacaacttatatttaaataaaaagccaactatcatctcgataactgacttttaatttttaatcacttatttgccttgtatatctttataatactcggcaaagttctctgcataattcttagcttcgggacttcctttagtttatgtacatctttatccattattctgcttatagaagcaataattccattttgtcgctatctaccactttgacattttcttccaatacaaacacatacctcaataatccagaatgtatcttttacattagattggacagattcttatcagtacctttgctatagataaatcaattaccaatctatttatttctacaaaaatatgcaagtaacacccaaaaagagcaccgtgatttcttatttaccacaagagattagagaaactagattaacagaggttacatatttacctattacaagggaaatgctagaaatgcttttctctaattcagctaagaagaataagcataaactaatcaagaagagaaggcaaaatttctaattagtcatttatgtttccctgtctataaatacaaggatttattttgtggaattttagtaaaatatgctatcaaacatttttattctaaatataaaataatatatgtaatcaagtcgataaaccgaataagaaacatcgttaaattattgcaaaatattgtatgtaaaatgatgaaaaagcaatctttgtattttatattttattatctttgtaataaactgatttggctattatttttatggaaaataaactcatatatacagttggacattccaatcaggaaattgaagagttccgtagtttaatacaaacatttgatattaattgtattgtagatgttcggagcgttccagcaagtgcatatacaccacaatttaatcaagataatctgaaatattatttaagacaatataatattgtttatttacatttcggtaaagagtttggagctaggcgtaatgattgtttggatgataatggatatgttaattttgaaaaagcaatagatacaacagcatttaaatatggagttcagcgtttaatcaccggattaaataaaggttttagaattgccttgatgtgttcagaagccgctcctatagaatgtcatagatttgctcttgtttctagatatttttatgagcgtggatttaatgtaaaacatatactcaaagacaaaagtatagttgataatgctatattacagaaagaaatggttgatatatatgtgaaagaaaaaaaaatacgtgatataaatgatatttttgcgacaatggaaaattatgatgaacgttgtcaaataatagatgcttaccgaaaaaaaaacgaagagattgcttatcatgtagaaaaggaggttatatgattacattatttacaattggttttacaaagaaaagtgcagaacatttttttgaattattaaagaaatatcatgtaaagaagattattgatattcgcatcaataatactagtcaactggcgggatttgcaaagggagtagatttatcttattttgctcaacaaatctgtggaatagaatatactcacataatcgactttgcaccaacaaaagagttgctatctgattatcaaaagaaaaatattgattggaaaggataccaacaaatatataggaaattaattgaaaaccggaaaatagcgcaaaaatataatattgaaaattttgatggtgcatgttttttatgtagcgaagagacaccagaacaatgtcatagaagattgttggttgaatactttaaagagctttatccaactaacattaatattgtccatattaaataacacgataaaaattctagcgttccactatgaaaaaacactttatttgtttagcaaattccttcaaatatgcaggtcgctgtttgggagggattgaaatagaaatgaaggataataagtatacaatagttcgtaatgaaaatggaactcctaaatggattcgtccaatctcttttgaagagcatgggcaacttcctgcttcagaaacaaggcatatcaatatccttgatattatagaagtcgatattacggagacttgtccaaagtatgcacatagcgaaaatattcattattctaatctagtaagaaaaacaagatgtagtaagcaagttgatgcaatggataatttatgtgataatattcataagaagattttctataactgtggaaaagctgtacctactaatgtttttcaagaaggaaaatattctttaatgcttataaaacctgattctcctcaaatatattatgattcagacacaaataagtatagagcgaaatttacctatgaaaatatagaatacgattttcctataacagacccatattatattgatttgttaaaacatacaccttcattatgtgttgcacgtaaaacaggagagttgtatttcataatatctttaggagaagaacttgacgaatggcattataaactcattgcaggcattatagatatgaaaatagaagattaaatcgtatataaataaaaaaaggtagcaaatgaatgttacttcaaatgctgcctttatttaattattacttcttcttgaaagtggtttcagtaccatactcattcttggcagtcatagtattgccattaatgttgatagtgtatttgtcagtatcatcatcgtcatagtttattattaatgtactggatttactatcataagtgtaagtaaactgatatgtgtatgattcactatcatcgtcataaaataaatgctcttctccgcttccgtcatttcggaaggtccaccttaaatgttcgccttcatcatcgttctgccatactccaaccaatggattagacgggtcgtcatcatcatcatcaccacaagcggtaaaattcaaacacaacacaaccattaacaaggtcattccaataaatctcaaagttttcataattgatataaatttaattctgccaacctgttccctcatagttggctactacatacaagaagcgtgggaactactgaatattactatcatgaggctctggactgcccactacttaataataaacaatagcccacgccagaagaatatatagttcatcccttaagatgaatatataacactgacgtgagcgttcttgcctattatcctaagtagttgaaattgtccagatttcatgataggataatattttaaacgctcttcgttaactatgtcctttcagaactatctccatagaagtctgaaattgctacaaagttactaaaagctgtttaatttgcaagaactattgtttattaaaagttgagagctgtctctactcaataattcaaggttggtatgaaacttgtcaaatccccatataagtagaaattctgaactttcataccaacccaattgtcagaagctaagacaatcataggtatttaataattcttcttgccttaatcccaagtatcttttagtgattgatacactggaatgattgaatagctccatgagcttaacaagtgcaagctctgaattatcgttattcatgttgtagacctgtctgccaaaagtctttctaagagaatgacacgaaaaattgcctatttgtagcctgtattttttcttaatctccttcaacatgacattgattctctgaactgtgtacactgtccccttctgacttatcaatacaggcgcatttatgccaactggatttatatgaccgtaacaatctctgatatgttgctgtagctgcatattaatcctaattgtcctctgcttccctgtcttaatctctgtaatggtaaactcttctgcatctaatatctgattccaccttaaggcgagaatatcagaaattcttagacctgtgaagcaacctaaagcaataagaagtgacatcttataattattatcccttgccaattttcttattaagttcattgcttcgctccattgcagataatctgctgttgtacttgaatatttaagtgacataacgttctgttttatagtgaaactaatataagtgaatattaattttaaactggaatatctaacctgctgattattagcaaaacattcactaatagagaaagtgaacatttttataaagcaaggacactaagtaaataatgtccttacttcattcaacctatataaaaggtaagtgagcttcatccaacacgccactgtcaactatccgtttgcaaagttcatgcgatgcctgatttctaaggtctgtgccatagtccttattaccaaccatgcggataatctccactatggttttcattaattcctgctgtagtgtacggtggtaataccttgtactttcagcaaaccttttaggattccaactataatcgttcaaggctctttcaagttcttgcgctgccttgtattcgcgactgccttctattaccatatttataatatttaagaggtttataaatagaaagagtacctatatatagtatatagataccctttcagtagtactatcatctcttagtaagacaatagccaatcaatagaatatatccaattatcataactggatataatagcacacttacaaagaacgtagcaatcacagcaagtagataaaacaaactcctcatagtttcagatattgagtatttgacaatcctgtgtattctcaaataccactaactaagaaaccattggtatttgtcatcaccgtgtaaagcggaacatatacccgttgcaagttctgtagcattataggctctatccaagaatgaatctatatagctgctcttatttgcacctgtgagcaagttgtagaacttccacatagacaaatcattccccaagctgccaaagttctcgtcattgatatacgctttagccacattgttaacctgtgtatcagtaagcaacattttaggtatatctttctgatagccttgcggtaatgactgataaagtctcattcttccaagtagttggcaaaactgatgctccgtcatactggtattgcctaaagactgcatcaaatgtatgtgtttggctgcatcgtatttgtggaacattttcaataccgcttgatataaatcccttgtattggtaacttccaagcaactaagataaccgtctgtagatacacatagatttgtgcaaaccttacaagtaaagccaataaacactttaaaccgctccgcacccttctttgaataaagattggtgtggttataagctcttacaccaccaatagtaagggttagcctgttaccgtgtactgtctcatagatagtaggaacttcaataacaaaagcgcacctttcgtagtagatagtcttatcactttctaataactgattggctggtttgtgtattgcttcgggaatcctacctttgattacatgagaaacacgaatatctggcgattcaatttgttcaccgctaaagaatgtattggttgcatcctgtaccgcttcaatgaaagccacatgagataatgtagcttcgttgtcctttgcgaatacgggtataatacaatcattccttagatgctccaaactggcttcaatcgtattggcttcaatgaatagaggtcgtttctgcttaataattggctcttcaattattaccgcttcttctgcaaattcaccaaagtttctactagttctttgtactggcataatctgtaatgttgattccataatctgtaattattaagttaatattagaaattcctctgtctgaaagctaagcaagccacaatcagtattaataatccaataaagaactgtggcattaagactactggcacaattagaattatcccaaacgtcaataaaatctttaaattctccatacgcataataatagattagtaaatagtgtatttaaggacaaaatgagggcttgacatgaagttctttcttatcactttcctttgtgcatctttatatgtagacatatacaaatcattgataagtccgcacatttcagaagttcaaaaggtttgtgggctgaatggcaattcatgtaatcctttcatttttcctaatgattggtatggggtgttttgggtaatagaaggggattatgcacgatatacatctgatacgctcactgacaaatcaaatatttcaccttatagctgtataaagtctaaatagaaacactacctaaatctaaagggcgggggtatgattttaagtacctatattttttgagttgggtatcaaaaggaactttaccagtaatatatatcactctcaaatgccattagtggcctttaggatatactcccctatagaataacggacttatgccagtatcagtataaagtttgcagattgtccacaattcatgattttactgtcggaatattaattacctttgcaatatcaggacaatgagaaacaccccaaatataatcctcaaaattattccgatttcatgttagagataccctaaacgggtataattcgacctgatgcgtatcaggttttattattcttgtgactgtccaatatttctaccatgactcccttatactaaagataaaaatcctctataaagtggacaacgttaaattagattattccagtcaaattaacttttaacttaacttatgaagaaagaaatgattaaaattccggcaaatatcaagtatttaaccgaacgggagaagttcatagaagaattcgggaaaccgtttgaacttcccaatggtattttgaataaagagatacccggctgtggagcaactacagtcgcactgacagatgaacataaaactattatatgcagccctcgcaatgaactgttgaaaaacaaacatgaacaataccctgataccttgcttgtaattggcggggtggacaccaaagagattgaagcatatttgcagactgcggagcttcccaagattctggtctcctacgattccgtgtataaattgattggctgtattaaatataaatcagattggcgtgtagtagtggatgaattccaatgcctgttggcagatagcagtttcaagtctgaaattgagttgcactttttggataattcaaggtcgtttccgtatgttacattcttatcggcaactccaattcttgacaaatatctggaacagattgaccacttcaaagatatgaattactatcagcttgactgggaggaaaaggatattgtcagagtatatagagaacgcacaaagaatcctatcaatgcagcattggaaatagttcgctattaccagaacggcaattatccttctgtgtatgttaatggggaaaggatttattccaaagaatgtgttatatttctcaatagtgtaaataatattgtgaacattattaaacaaacggaactcaaaccggaagaagtgaatatcattgtaggtaattctgacgataacgataaacagattgcaaggattggggaaggattcaaacggggaagaattcccttgaagggggagacgcacaagaaattcaccttctgtacttccaccgcttatgcgggctgtgatttctactccaccaatgccgcaacttttgtcattagcgattgtagtcgcccgaacactgcggttgatatagcaacggaattggtacagattgcaggcaggcagcgtctggcatgcaaccccttcaggcagttcctcaccttcgtttacaatgtcaatgcagaggaggtagagcaggagacattcaatgagcatctgtgccggaaggtcaatgtgacacttgacgagattagagacaacaacaatgccggtgaagcattgagagccaaacgtatcaaggattttaggagaatccccgacaatgtaaaatatcaggattcatatacaatgtacgatgaacagaaaggagaatttgttttcaaccgtttagcctatgtaaatgagcaatactgttttgatgtccagaagttcaattatcagaatggggtaattgtaaagaaactgctccaagatagtagtttcgatgtcagtgagaatcaaacttatgccgtttaccaagaacagttgaaacatctaatcaaaaaggagccatttgtagacaggatgcaggcatactgtgaatatcgtgccaagcaagggctgattgtcaatctcgcaatgtcaacactggaaagcaaatatccagaattgaggtattattatgaggctttgggcgttgacaggattaaagctctgaattataaagagaagaaactgctcaatgaaatccatatcatgaaaaccaaaaataagattcgtcatgaattacacggcattattcatatcggagacagaatattaactactgatattcagcaaaccttacatgatgtatatgacaggctaggcattgacaagtcactgaaggcgaccgacctcaatgaattctttgagattcatcccgtcaagataccgaccgccaacggccggaagaatggctttgagattcgaggaatattgtaaacaaacagaaagaggctgaactcaaaatcaatttgagacagcctcttatttttatgtatcatgtacaatccggttattcttattgctgttgagcgttacgcatctcaataactcgctcgatgattaagtgctgaatacagctaattttatcttcgcacttagctgcttcaatccgcaacttctctgttgcttcgatgctgtttaacacatcacagactgtatcaaaaccatattccgagataccataattaatggccttaatatatctggtctgttttgcagctttcacgccaaaggcttgtactgttgccttcatcaattgctctgcctgcgcataagttctatattcttctttaaaaagagaagaactcatagcaagggctttgctttgtaataaagaaacagtagtgcttataccaaaatatccctgtacggcagtaccggacatagagtacattatgccaaacttgcggatattcagaaataattcatctcccgttacaattccggcatatcctatccactcatcctttgaaggacattgggagagatatgcagttgttgccactctgcggtaagcgtcagaaacgctatcacattccactaattcagcttgcagtggctcatccgtcaaaccgagcaagttaacattgtcggctttatccagatagaccattacggccggagcattatcgggaagattccctattttactacctacgtaatcgtatagaggaacattctctgcgtagaatggttttgcatcacagaagcaaaacacggtcggcaggagcttgctcttatctatagattcataggttttattcttctcaaggcatttacgcctgatagaataatcggtgaaggcaggaatgatttccagttcttcgccatttactaatatcgtggcaacaaagtaccatttgggagcttcttcgctccccaaatttacatgtttcataaaagttatattattattgaaactatcaaacggtatataagagcgggcatacttataccttcatatatacccggcaatccgagaattgcctaattaataatattaacaattatgaactaattgttacagcttatcacttccaagcaaaagcgatagcttaaagcaccgaggtgctggggtcggattgtacatgatttcaaagagcgggttgttcaatgcttactcatcaacaatatgagttaatcatttaactgctgcaaagataaaccattttactgataatatccaaattctacaatccattatggttaatttcgtccggattattgtacaaatatagactgtctgttaacgtcagttaatgagattttatcatacctccttacagccgtagctgttcgaggagaatatggcggtttgggtagtagaatcactttacttgtctttggccttcaatattgccgctacaatttctttcatgtcattaaggctgtcattatccagaatccccattttgaaagccttatcaacaatctgcatgacagtttccacatttacctctatctttatacatttgacaattaacagcttaagctcgtccctcaaattggacagattaccaacagacagccgttccacatatttatgggctacttcaaggccggaggcgggagattgcataaaagcctctatttctttcacaataccacttatctcgctattgtaatcatatagtttgccgtccttcacataccccatacgttcaaacatgtcactggctttattgattttagatgcaaaaaattgagtgtctaacagagtatcgaacgtaataccatttatagtattttgatactgttttaaaatattaatggcttctttgttaccttcttgactaatagtagtaggtactttatcagattgccttacttttgtagattctgtttccaacattagtaaagcggcatcctcagaggttaatcttacatatttcttaaaagactttgcatcattatgtcctgttatcttcattataatatgactatcatagccatgttttagcatattacagataaaggaacgtcttgctgtatgcgttcctattagttcgtatgctttcacttgtgttgtaacaacttctcctcccctatcctctgttacattatgtaatcttgttatacctgctttttcacctatgttctttaaatagttcaaagctgtttgattggtataaataggaaaaccatttttatacttattcagaatatctatagcaacaggtaaaagaggaattgatactctatgcgttttcttttcttgcacaatttctattactttccctttaccattaggcgcttcctttataatcccctcattaattgcttgcgtatcagagaagcgttgccctatccaacattgtaatacaaacaaatctctcacttcttcttcccttcctgttaagcgcaaagcatatattttatctatttcatcttccgttaaataaatctcattttcatcaccttgtctactttggggctttttatacttgtccagtttggattcgtgaatatcaatcatgccttgctgctctgctcttttaagaatacatattatcttctctaccttattaccaaccgtagtagttttcgttgttttacctttaccaacttccttattaaaaagataagattcataatcctttatcaatggtaaatttatatcactaaaattaataggatatttacctacttcattcagaaaagcttcaaagaactttatttgtttcacataatcagctcttgtactatcttttatagttctatctaaagctaatgtattacgtaaccaatgtactgcatttatattttgcttttctttctccatagtatctttgtatataaacttctttaatatcttaacactatttccgatttcgttgggattgtcacaaagataacgcttatattgcagaaagcgatttttaatctcaattattttcgtgttaacaatagtattattgagattatcaagttcacttaacctacaactgatataagcctcttgcttcttcacattccaatgttctggatataccttaacacccgtagaaagtcttatttgcttcctatctatcctgcataccaaatagatattagtaggcttgtttgatttgggttctctcaaattaaacttagcctgtacttcataaaaaaaaatctgtcccgtttgagccttgttattcatttctgtgcttcaatttcgtaattcaaactcgtacttcaatttcgtgcttacaaggctttagctaacaaaatatcaagaagaatcctctttcacagtattgtagaacgccaatttactatcatcaataaggacataaaaaaatggtacttttccatagtggatgtggtggctgtcctaaccgatagtcctaatcctcgtaagtattggagtgtcttgaaaacacgtttaaaaaaagaagggagtgagttgactacaaattgtagtcaactgaaaatgagatcggctgatggaaagatgtatttaaccgatgtcgcagatactcagcagcttctccgtttgattcagtctattccatcgcccaaagcagaaccgttcaagcaatggatggcacaagtggcgactgaacgtcttaaccaaatgcaagaccccgaactctctatcaatcaagcactggtggactataagcggttggggtattcggataattggattaatcagcgtctcaaatccatagagattcgtaaagacctcacggatgaatggaagcggcacggattgcaagagggggtgcagtttgctacgctgaccgatattatttatcagacttggagcgacatgaccgccaaggaatataagcagttcaaaggtctgaaaaaagagaacttacgtgacaatatgaccaataaggaattggtactaaatatgttggcggaactttccaccaaagaaatatctgaaagtaaaaatccggagacatttcgggaacacatggatgtggcggaagccggtggtgagattgcccgcaatgcccgtatggagttggaagccaagacgggcaaggctgtcatcagtccgctgaacgccaagacaggtattgcgctcaattcatctccggaagaagaagaagacacaaaagaataatcctaaaaagtgaatcaatatcatggagacaacattgcatacagaatggactgtcgaagacatctgtaaaggatttacctacaacgaattggaaggtaaaggtctgtttggattggacgggcggctcactatccaacccgagtatcaacgccattacatctacaatgatgggaaacgtgatgtagcggtaatagaatccctgctaaaaggctatcccatcggactaatctatttcaaccggactgtggacggacgatttgaagtacttgacgggcagcaacgcatcacttccatcggccggttcatcacaggcaaattcgccatcaagaatgaagcggataacgtgcagtatttctcgggattgcccgaagaacagcaacaaaagattatgcaatcctctctgctggtatatgaatgcgagggtgaagaaaaggaaataaaagagtggtttaagaccatcaatattgtgggcattccgctcaaggagcaggaattgctcaatgccatctattcgggcgagttcgtaaatgcagccaagcgggtgttcagtaattcccaaaatgcggaaatacagaaatggaatcattatatcaagggagatgtgaaacggcaggattatctggcggaagccctccggtggatttgcgacagtaaggggatgagcatcgacgcctatatgagcatacaccgtcacgagccttccacgggagaattggaaggttatttccgttctgtgattgactgggtatcaactacctttactatggtagagcgtgacatgtgcggcttggaatggggacggctgtatgaaacgtaccatgccaccccttatagcaccgtccatgtcgcggaacgggtaaaagccttgcaagcggatgaaagtgtgcggtgtcccagaaatatttacgaatatgtactgggtggagaagaggataagaaactgcttgacgtccgaatctttgaagaatcaaccaagcgggctgcttacaagcgtcagaccgaagcggctgagaaacaaggaatttctaattgtccgctctgtgcgttggggaataatgccaacaaaacccgtatttacaaactttcagaaatggatgccgaccatgtgactgcatggagcaagggaggggcaaccagcatggaaaattgtgagatgctttgtaaaacccataaccgttcaaagggaaatcggtaaaagtgtattattttgagagagttaaatcaattaattctctcaaaatatgaacaataaaaaaacatttcacgaagtttccgagatttggtgtgatgcaaaacgtccgatagtgaagcattccaccctatgtgcttatcagcttacgttacagacacacctattgccacgatttggcgctgcggaaaatataacagagaaggatgtccagcagtttgtgatagacaaatgtacttccggattagcaagaaaaacagtccgggatatagtggcagtgctcaaatctgttatcaaatatgggaataagcatgggattttccattttgaagaatgggaaattgaatatcctacccaaacagaaaacaaactgccgccaacattgtcattaaatcatcagcgtatattgatgcgtcacttgctggaacagcccactccacaaaatataggtgtactgttggctctctgtaccggaatgagaatcggtgaggtttgtgctttgaaatgggaagatgtggattttgcacaaaagacagtcatcgtgaagcatactgtaggcagaatatataactgtgagttgaaatctacagaaagggttcactcttcccccaaaaccaagaattcttgtcgtgagattcctatatccaaacagcttttccaagcgttgaaaatggtaaggaaacaatctcaatccccatacgtggtaggcacttccatacaatctaaagagcctcgttcttatcgtgattattttggcaggttgctaaaacgattggatattccccacttggtctttcatggacttaggcatacatttgcgacccgatgtattgaaagccagtgtgattataaaactgtcagtgtcatactcggtcactcaaatgtggcaacgacacttaatctgtacgttcatcctaatctcaatcaaaagaaacggtgtattgaccgtatgagtaatttcttgggaataacatgagttagtcttggcctctatatacatgggggacaaaaaaaatgtcctccatgtatgtgatgcgcatgattgacgtcattatcacaagttttttaagcatacagttgttttaccttctacgttgatgttttgcttagattctgctgatgttacctttttctgtcgagatttatatgagagtaaacaatattgttcccaagcatttttctgtcatgatatggctttttatctttttgacaaaattacttcggagaacttatctaccggacaaactggatatttctttagaacggatagagagagtctcgggaaacagaactatatagctttgaatatggatattagtctttggggaaatgaaattactccaattgctccttttatcaaaaagattgatgaatttgatattatacatacagatagattgcatgtggctattttagcctgtttactgcataaacgggtacatttttataaaggaggacactactgtcccgtaaaagtggataattagttctttgaaattattgaaatatagtcaattacgcggttttttaaaatgaaacggacttgattttgcaactttgcagtctaatacaaatggctgctatgttccaagacaaatacgtattctctcaattaaccgcttttctgaacaggactcagttcaacaactatgttcgcaagtatgatggcaacagatatgtgaaacatttcacttgctggaatcagatgctcgcgatgatgtttggacaactgagtaaccgtgaaagcctgcgagacttaatcgttgctttcgaggcgcatagggccaagcaatatcatcttggtttaggtcgtgaaccgatagccaaaacaactcttgcgacagccaaccagaaccgtgattacagaatcttcgaagactttgcattctatatgatgaaggaagcctgcgagaagcggacgaccaacatccttgacatttccggaaagaaatatgcgtttgattcaacaacgattccgttgtgtcttgcaacattcccatgggcaaagttccgaagcaagaaaggaggggtgaaagctcatgtcttatacgacattgaagcacaagttcctgctttctataccgtaaccactgcttcaaagcatgattccacagcaatgtcttcaatccattatgaaccaaatgcttattatatattcgacagggcttatgactcctttaaagaactctataggatacatcttacagactctttctttgttgtcagagccaagacaaacttaaagtataagacagtcaaatggaagcgaagaatgccaaagaacataatgacagatgcggaagtgaaactgaccggatatctctccgagaaaaaatatcctgagtcattcagactcgtccgatattacgacgaagaggatgaccgtgagttcactttcttgacgaatgcaaaacaactttctgcactggatgtcgccaatctttataagaaaagatggttaatcgagctgttcttcaaatggctcaagcagcatctcaagataaagaaattctggggcacaacagagaacgctgttcgcatacaaatcagtgtggctattatcacgtactgtcttgtggctattgtccaacatgatatgaagttgaaacgttcaacctatgaagttttgcaaattctcagcatatcattgactgacaaaacccacttgcgtgacctgttcgacaagactaatttcaatgatgtcaaagatctaaatgatcccctgattccggggctttttgattaattgtttaactcgtcccattttaacgggacactaatgaaaggaggatattttaagaatgaggcggtgtttagatctagtatgaaagattactttgatgatgtattcatgaaaaaatattaatttgtatatctagttaataactagtgtgttattacttgaatctaatgacctgtaagtaccaaaaaggagacgtaatggagacaaaaggggactggacagtatacgccctgttatatctttgcagagtcattcaaacaaaacgaatggcaaacagataacctttatttttttaaccatttaaactttaacgattatggctttagagtatgtagtaacaaaaagagtgttcggttttgacaaagacaaaaacgaaaagtatgtagcaaaatcggttcgttccggtagggttaattttgcaaagatatgtcgcaaagtaagtcagctttgtggtgttcatcggaaagtggtcgatttggtagtcagtggtctggtagataaaatggctgaggatattgatgacggaaagagcgttcagttgggtgagttcggaatctttagccctactatccgtacaaaaagctcggatgaagaaaaggaaatttcgtccaagtcaatcgttcagagaaagattttattctatccggggaaaatcttcaaagatacgttggcggacatgagtattacgcgtcgtgcggagattgaaacagattatacggacggaagtagcaacggtgataataccggcggaaagccgggttctggcgatgatggcaagggagaaggaggagtgacacccgatccggcagtataataagtttagttttgctttaaagaaggctttagagttgtggatgcacagagaatcgatgaatattcgatgatctgtgcatctttttttgttaatattctactattgaacttttcaaacttgcaaaatcgtttcaatcggttcacagaacctttcacaccctatattttgttctgaaagtatgattttattcatttcttaacttctatatttgttcacagaaacgaacgactatgaaacatggaatctatatattgactttttttatgacattacttggtctttcggaaagtggatatgctatgattccgtttttcacagctacaggtgatacggtccggcgggcagtaatatatttcgaggtgtctgaaacgtgtgttgactcttgttatggtagtaataatcaggtggctgcagtgttggactctttgttggcgaggaactcggatacgaaatatataactgctttgaatgtaatcacttctgtttctcccgaagatgacgagtcttataatacaaatttgatttccaagaggaatcactcggttagtgaattcttacaacgatatcattcgaatattgatgttaataagattcattatttttcagcaggcgagaattggtcagagttacgtaagttggcggcagctgaccctaacctgccggatcgtgaggaagtgttgatattgattgattatcataagaatgatatcgcaaaacggaaacaattgttacgtaagttaaatcagggagctgcttacagatacatggtcaacaatgtatttcctaagttgaggcggtctgaaattacaatagtccgggaaatcccggaagtggcgaaggaaacctttgaaccggtatcttctgtctccgagttgttggtttcaagacaggaagaggcgcttccggatagtcagcctgataagtctgtgggagaaagtgtaaatgaacagacctgtgaggcagttatgtcggaggcagaaggaccggggaaaagtaaaacagtacttgcagtgaagaataacctgctatatgatatggcattggcgccgaatatagaagtggagattccattaggcaagcggtggtctttgaataccgaatacaaatgcccgtggtggctgaatagtgaacatgatttttgctatcaacttctttcaggaggcatggaaggacgttactggttgggaaacaggcagaaacataatcggttgaccgggcattttatcgggctttatgctgaaggtggaatatatgactttcaattacagggagacggttatcaaggtaagtattatggagctgcaggagtgacttacgggtatgcacgacaactggcacttcatttttcacttgagttcagtctcggcatagggtatttgacaacggaatataagaaatatactccttacgagggggatattatatggacaaatagtgggcgttataactttattggccctaccaaggcgaaaatttctctggtatggctgataacaacaaggaggtaaggacgttatgcgagatacaagatatattattcttgtgcttctgtcctcgctgctgatgctgaccgggtgtagtcgtcgcgatgtattggatgattatcctgtaagcggggtagaaatcttgttagattgggccggagtaacagatgaattgccggaaggagttcggattatattttatccgaaagacggggaaggcagaaaagtggataggtacctttcggtacaaggtggggagatgaaggtccctcccggacgatattcggtggtagcttacaactataacacggaagtagtgcgaatccgaggtgaggaatcctatgaaacgattgaggcatatacgggatattgcaatggtttgggcattgccggaactgaaaaaatggtttggtcgccggacccgttatatgtgttgaatattgatgaattgaaaataaagaaaagtgatgaagtgtttcacttggattgggaattggaatcggtaataaagaactactcctttgcaatagaggtgaaaggactggaatatgtgacatcagttatagggtgtgtaaatggattgtctgattgctattgtataggtaaaggttgcggaatgtgtaactcacagcctatttattttgaagcaaagaaggagggtggcaaagtaatagcgcattttactgcttttaaaggggagaaagatataccgacgcgaatgtcaatgttgggagaaccggtttctcgagaagcaagtagtgtaaagttgatactaagttttgtaagaactgataatacgatacaggaaaggacgattgatgttactgaaataattggtacgcttgaaaaagatgagaaggaggaagaaggaaaacaagatccgccaccagagattgagttgccacctgatgataagattgaggtagagaaaccggaaacaccacctaatcctgacgggggtggaggaatgaatggaaacgttgatggttggggaccagaagataatattgaattaccagtaaactgattcctaatagcataaacagaatagaataatattattaactaaaaagatacagttatgaaaaagattttattggcagtaacagctgctttggcaattacgagttgctcacagaatgaagaatttgagaatgaaggacagaaaactgagattaactttactaccatagtaagtaaggcaacaagagcgagcgagttaaagacagaaggtttgaaaactaatggtgggtttaaggtttttgcatataatacaaaggataatgatatgtctgctgaaaccattttgggtgaaacaccatttatggatggtgtggtagtttcttggaatagctcagcatggacaatgaaccctgttgggccttattactggcctttaaaggataagattcaattcttttcatattcgcctgtggctaatgtgaactatgttgagccgactagttcaaaagcaggttatccaagtttttcttatactatcgttgattctcaagaagatttagtcgtggcttatgcaaaaaatgaaaccaaaccgggagtatccggtacacctgtaaaattagattttaaacatgtcctgacccagattaatttcaaattaaaagggaaggatgatggttttacttataaagtaaccaagattactttgtcaggaataaataatgctggaaattttacttatgttgatcctactgagagtgtagtaggtacttggtcaaatccttctacttctacatcgtatcagtataatgcaacttataccgattttacaggtacttctgaacttactttagcaacgggtgataatgcattaatgttaatgccgcaaactttgggagaaaatgcagaaataacaatagcatattctactgtatatggtggtggagaagtctttaatggagagaaaaaagttagtttgaaagatgttgtttggggagctggtgataagattctttatactcttttattaccaggcggagctgaaaatgttacatttactccagatgtaactaactggaatactcaaacaacgccggaagcaaacgaggctcagtaaaaactttctagatttgaaaattgagctttcgaaggattatttcgagattagaaatacttttaagaagtcatctcagaaaaatgagatgacttcttttttacttttctccttttttttatggctatatgaaatctttcatatatttttgttgaaaacataaaacaaatacaagcaaagccaacatatgccgtctatctgtcaaggaaattgggattgtcaaaactgtccaaaagctgtgagcaatgccattgctcatattatttatcagcggggtttccataggcctgcgcataaatgcgaggagaatttcattctttttttgatgaagggagagatgctggttaatagtcaggaatatgcaggtacgatgctcagagaaggtgagtttattcttcaggctatcggatcaaaatttgagatgcttgctatgactgaatgcgaatgtatttattatcgtttcgttcaaccggagttgttttgcgatttgcgttttaatcatatcatgaaagaggtatctcctccgcttatctattcccctttaaaaataattcctgaattacaatatttcttgaatggctctataacctatttgaagggagataaagtctgtcgggaattgttgtctctcaaacggaaggaattggcatttgtgttgggttactactactccgattatgatcttgcgagcttggtacatccactttccaaatatacaaatggctttcaatgttttgtcattcagaattataaaaaagtaaagacggtagaagaactggcacaattaggcggatacactatcagtacattccgtaggattttcaatagtgtctttcatgaacctgtgtatgaatggatgctggcacgccgcaaggaaaacgttttggacgatttgcttaataccgatcacagtatctcagagatttgttataaatatggtttcgaatccctgcctcatttctccaatttctgtaaaaagtcttttggaacctctccgcgtgcattaagaactgaaaagaaagtagttcaataataattgtatgccataggctaattttttattatttcgtttgcgggtattatatatttattgtacattgtctgccaatttatttataatcaattagatataccgttgtcataagacttaatgaatatagaataggttttaaactagaagaataaacgttattggctataccgagattcatgaaaactgaaagaatatctttgtgtctaatatttattctgtgtaatgttctggtactgaatgcacaagaaacgatacacatttctcttggcgatagagaggatgctacttgtgaaatcagagaaactctcatgaagtcccgatcggatcaggtaaaaattatatttgaaagaggggtctattattgtctgccggattacgctaatgaaaaatattgtgttatatccaatcatggaaatgggactaaaaagatattgttttctttagcgaattataaaacaatagaaatcattgggaatggggcaactttgttgtttcacgggcgaataatgcctttcctgtttgagaattgtcagtcggtaaagataaaagggttaacgatcaattgggatattccgtttacctttctgggagaagttgttagtattaattcaaaagaggggtggagggaaattaaaccttttcaggacggattttgctggaaagtcgagaagggtcagataaagtttcctaatatagatggctttaattatacttgtttaggaagtacacttccttttgagaaaagaacaaaacgtgtggtacatggtgcgatagatattgatagtaatccttccggagtagaaagaatggagaacggtaatcttcgaatttatgaaaaactcaattattatcctcctgtgggggctttgctaagttcgaaaggtgatcgtgaacatgatcgttatgctccggcgtttgattttaaagagtgtaagaatatttgtttggatagtataacgattcatcatgctttaggaatgggatttttatttgaacgatcggaaaatatgcagatactgaattctcagattgtacttccgaaacatactcaaagagtgatttccactactgctgatgctactcattttgtcaattgtaagggagatatactgattgagaactgtcgttttgagaatatgctcgacgatggtactaacgttcacggtacgtatgttgaggtagatgaggtcatagatgattatacagtccgtgtatctttaaaacatttcgaacaattaggctttaaatttgcagaaagaggagatgatatctggtttattattcatccttctccgcagcgtggggaagtgaacacagtgagccgtgtatttacactcaatgaacgttttatccagttgtcttttgctaaaccacttcctgccggattgaagagaggtgatattctggaaaataagacgtggaatcctacttttacaatgcgaggatgtaccatacgaaatcatagggcacgcagtgttattttgaaaactccattgaagacaatcattgaaaacaattatttttcctcgatgatgtcggctatcttactccgtggagagactcgtttctggtttgaatccggagccgttgaagatgtattgatacagaataatatttttgagaattgtgctgattgcggtaccaggcatgcagttttgtatgtcactccacgactgggtacgcagtttgaccagacgcaaacttatgatcgtaatatacgatttataaataatacaataaatagctttaatccgagagttgtctgggcagaccgtgttgacggtttattggtaaaagacaaccgaatagtccgtaatactgaaaaagaaccgattttcccgcgtgatcctgtttatgaacttatcaattgtaaaaacattcggatggagaacaaccaatattcaggcataaaacctttttctctgttgaaagcagatgcagtatcgcagaaaacgttgagctttgataagatgtacttcactaaatagaacctatatatttctagttataaaagtaaaatgataacttgtgtatgaacagaaaattgttacccttatttctattgagcagtagtattgcagctgcccaacaacctaatatagttatgctttttgttgatgatctgggctggtctgatttaggatatcagaattctgaatttgaaactccgaatattgacaaactgaaacatgacggattatacttttcgcgcacttatgtctctacggcaacatcgagtccaagccgtgcctcgttgcttacaggcaaggaagccttgcgttgtggttttgtccgtcatatctatgataatcctgacagagaggagtttcagaccatggcgaaagatcccggtcatatgaaatcacgtggttggttgcctttggatgaaattacttatgcagagcgtttgaaggagtttggctattataattattttgttgggaaatggcatctgggacatgagccatattatcctattcatcagggatttgatgctatgtatggtacatgtgaacatggacatcccaatagttattatcaaccttttttcaagacagaaaatccattccctgacacatcaaatagcgaatacttaacagataagctaacagaaggagcagtcggatttatagaacattgtgccgataagcaacctttcctattgaatgtttggtattatgcggtacatgatcctcatattgggcgcaaggatctgattaataaatatctgagaaaaggaatggcaagaaaaagagccgaatatgctgcaatggtggaagctgtggatatttccgtaggttgtatacgtgatgccattcagaagaaaggccttgcaggaaatacagtttttatatttctgtcagatcagggaggagatttcagtaatgctccgttaagaggcggaaagagaggaggagataccttggcggagggaggttcgcgggtacctctaattatctatgtaccgggcatggaggctatggggcagtcgtatgatgccccagtacaaactatcgatctttatcctactatggtagagttggcttcaaagaagaaatgtagtgacaaacaaataaatgggataagtttaattccggtattgaaagggaagaaactgaaaaaaagggacttgtttttacatcgcagttatgaagatcaaaatgctgcgattattgatggtgattggaaattaattaaatatcgtagtggtaaattacaactttataatattaaaaatgatatcggagaaacgacgaacttaattaccgtatatcctcggatagtcgaaagaatgttgttgcgtttggaagattggcaagaaaaagcaactcccagggaattactgtcttcgaattgtgatttataactcgcaagaatattgttttttaaaatcaacacgtacaaaaactatagtattaattaaaaaaagtggttcttcttcaaatttggtggtaaggtgaattagtaaaataatactctgatagtttatagtcgatagtatcttttattcttctccttcggcaaggaggagtccccgtagggggaggtggtaggtgaatacataagtctattatgaaaacagataggtacacctactacctcggctttcaagagggcgctggaaaagtatcttaaaataatcatctagttctgctcatattagtttatagcctaaaaagacaacgactacacgaataagtgtatattcccctctattccattggtttcctcaatttttctgctacttgtagcaactgtgctttataatctatcatagaaatagcaggaattgcaccgggaggcaggtttttcttgatttcctcgtttttctttattaagtctgcacaagctttttcgcaccattgagcagctttttcgcgtaatgacatatctgcacatgctttgttcatccatttcacccactgcaataattgttcttcatcgcctagaattgtgtgtgaagcaagtagtttgtctccccgttttacaaacgagtcccactggttcataatgccgtctctgttaagccgtagattttcgcctatcatgtcggcttctgctacattcatctgtttcatacgagtgacataagcattcagtccttgttcgtcgaatgtacaatgtttcgactcatccactttcagatatgtataagagccgctaatccagtcttcaagtattctacggttgagcgaagaagcttgttgtggaaatctgtcggctatctccttcttatgatttaccacatataaaaatgccgaggagttgatatcatgtatatagcggtagaatatggagaaataaccttcatattccagtattttctgttcttttccctgtaagaaatcagcagctacttttcctgcctcttcttcacggttggcggcagaaagtacattgatatatccgcagacaaaagcagagtcacgctcacccgcttcatagcgtttcctaagacctgaaattccgccggactctactcccagttttactttttccaacagtgcagacgcttcgtcggcaccaagaaggcgatgtactacttcaccacttgaatttaggaaaagaagggtgggatagcctcgcacatcatatctttttttgatatctatcccttctcctttttccatatccattttcagattgacaaaatggcggttgaagtaatcggcaaccagagaatctttaaaaactaccttggacaacattcggcaagggccacaccaagtggtaaaacaatctacaaaaagtagtttgttttcttctttagccattttcaatgcattggcaaaagagagttcgcggaaagcgatgccatccggttgtgcaagagtcatttgcatttttttggcagggatcatttgtgctccctgtgcaggaactacttgctgtccttgtatcgtttgaaacgatagcagacatactgttgtcatacagacaagaaagagttgtttcatattaattattttgtgttgataagaataaatcccctgccggcatgccggcaggggattctgtcattaatcaaattgtccctcgactcttaaaacttagcaataaatttagtctttcagttttgcgatgatgaagtcgcggttcaagcgggcgatgttgctgatagagatgttcttcggacattccgcctcgcaagcgcgagtattggtacagttaccgaatcccagttcgtccattttagacaacatggcttttgcgcggcgcaaagcttccggtttaccttgcgggagcaagttcaactggctgacctttgcagaaacgaacaacattgcagaaccattcttacatgcagctacacaagcaccgcaaccgatacaagaagcggcatccatagcttcatcggccacaggcttcggtatcaggatagcgttggcatcctgcggagcacctgtacgaacgctcacgtaaccacctgcctgcatgattttgtcgtaagcggtacggtctaccattaagtccttgataacagggaaaccggccgaacgccaaggttcaacggtaatggtgtcaccgtcgttgaagcgacgcatataaatctggcaggtagtagcacctgttgcaggaccgtgcggatgtccgttgatgtaaagagaacacataccgcagataccttcgcggcagtcgtgatcgaatactaccggttcttttctttcgctgatgagctgttcgttcagaatatccagcatttcgaggaaggaagtatcaccgggaatatctttcatttggtaggtttcaaaagcacctttagctttcggaccagcttggcgccataccttcagtgtaaatgatatatttttatccattgtcttctaattcttttaaatgtttaacttcaccgattagctcttgtagttacgggtctgaaccttgatagcttcgtataccagcggttctttgatcaatatcggagccttttcatcgtcaccttgatattcccagcaagctacgtagaagaagttttcgtcatcacgtttggcttctccttcttcagtctggtattcttcacggaagtgaccaccacaactttcgttacggttcaatgcatcgtaagcaacaagttcacccattgtgatgaagtcgtacaggcggattgctttgtcaagctctacgttcatgccttctttagaaccggggataaacaggttggtttcaaattccttgcggatttctttcagtgcagcaatacctttcttcaagccttctgccgtacgtcccatacctacatattcccacatgatgtgacccagtttcttgtggatagaatcaacagattcattaccttgtatgctcatgaacttgtcgatcttagcttgaacagctttttccgcttccgcaaattcgggaaggtcagtagagaaacggggaacagtaatctggtctgccagatagttctggatagtgtaaggcaatacgaagtaaccgtcggccagaccttgcatcaatgcagaagcaccaaggcggtttgcaccgtggtcggagaagttacattcaccgatagcgaacagacctttgatggtggtttgcagttcgtagtctacccagataccacccattgtatagtggatagccggataaatcatcatcgggttataatatttcacgccattgatttcttttgccagttcgcccggattaacgtcggtgatttcttcatacatatcgaagaggttgccgtaacgttgaaggacaacatcgatgcccaaacggttgatagcttcggagaaatcgaggaatacggccaaaccggtgttgtttacaccgaaacctgcgtcgcaacgttctttagcggcacggctggcaacgtcacgcggaaccaggttaccgaatgccggatagcggcgttccaagtagtagtcgcggtcttcttcaggaatatcgcttcctttgatttcgcccttctggagtttcacagcgtcttctttcttcttcggaacccagatacgaccgtcgttacgaagagattcggacatcaatgtcagtttagactgcttgtcaccatgtaccggaatacaagtcgggtggatctgaacgtatgcagggttagcaaatacggcacccttgcggtagcaagaaacagcagccgtacagttacaacccatagcgtttgtagacaggaagtaagcgtttccgtaaccaccggtagcgataactactgcgtgagcggcgaaacgttccaatttacctgttacaaggtttttggcaatgataccgcgggcacgtccgtcaacgatgacaacgtcctgcatttcatagcgggtgtaaagttttacagtacctatgtttacctgacggctcagtgcggagtaagcacccagcaacaactgctggcctgtctgacctttagcgtagaaagtacgtgaaacctgtgcgccaccgaaagaacggttgtccagcgtaccgccgtattcgcgagcgaaaggaacaccttgagctacacattggtcgatgatagcgtttgatacttcagccagacgatatacgttagcttcgcgggcacggtagtcaccaccttttactgtatcatagaacaggcggtaaaccgagtcaccgtcattctgatagttcttggctgcgttgataccaccttgtgcagcgatagagtgtgcacgacgcggagagtcctgaatacagaagttgaatactctgaaacccatttcaccgagtgaagcagcggcagaagcacctgccagacccgtacccacaacgatgatatccaaacgacgtttattagcgggattcaccaatttctggtgagctttatagttggtccatttctcagccaccgggccttctggaatttttgaatctatcttgatcataatattatttacaatttaatcatttacaatttactatttagcaagcaccgccacaaatcagtgatttcgcgaagaataccactactacgagtgcgaaaccgagtactacaatcgttgaatagatgttagaaatacatttccaacggttgatccatactttgttgttccaccccagtgattgcatagagctccagaaaccgtgagtaaggtggaaccacagagcaaacagccaaacgaggtaaagaaccacgtaaatcgggcaagagaaagtctgctggatgtgataagcaccgtttgcggcataagccaacgtcagtgtgtcggcgtgcatacccatgttgtgcatcagttccggcaactgcatttttgcccagaagttgaacaagtgtaagccaaggcctacgattacgataagacccaacaccagcatgttttgagaagcccactcaacggttttcggcttgtcaaccactgcatagcgttcgctaccacgcgctttgcgattctgcattgtcagccagaaggcatagatgatgtgaattacgaaaagagcagccagtcctacggtagccgctaacgcataccagtttgctcccaggaactcacaaaccatgttgtaaccatcagccgagatgattgcaaccaggttcatcgccatgtgaaatgttagaaacaggacaagggcgataccggtaacgctcatcaccactttccttcctacagatgaattacttaaccacataaatgattgaatttaaattatttaattgttagaactaaaatttcaacgttttacacctcttacggactgcaaaaataggggaaatagattgattgagcaaggaattaaagaaattattccttaatcggcaacctttccgattttttcaccgttggccgccttctttcgcagcgctcggggagtgtcgccgaaagagtctttgcaaaagtgtgcgaagtgggatagagagtcgaaaccgtagcggttacaaatctctgtaattcgcatattggtacgctggagatcttccagaatgccttcccgctttttctccagtatccattcgtatacaggtatgccgtagaggtttttaaaaagccggcggaaagtagtggtggtataacctcccaaatgcgcaaattcttctacgttcttcaccgtgttgtagttttgcattacaaaataatggaaactttttgtgtacgtactgatcggatagaagaatgaacttaattgaggcgtcggataataattggtgatgaggaaaaccaactctttgcatttcagttcgatgaacttgctgcaaggtgattcttcaccgagaaattcgggcatactggtgatgagatgatgaagcctttcactcatgatcagcggagtgtaggtcagcggtgcttctgcctgttccgttatttcacggtaacgttcttcgcaaagcaggggtaactcattaaaccagtagacgatgtattcaacgtccgtgagggcaagcaactctattttcgagccgatagcttgcaggataaattgcttttcgcgcaggatatttccgggatattcttcactgttgataagtaattcgccttttatcatgaaaagcatacagttttgcgtgcacttatccttcgggatatgcgctcctttgagtaggtttctatacacaaggatgttctcgttgacattgggacatcctgtgcagttggtgtattgtatgcaaaatgaatcttttggcatgagttttatgcgtgaattattatcttccgggaacaaagataagtttttttgcggaaaacggaactctttctttcatttatgtttgagcagaaagttgacagcaccgttataaaaactctgtgtcctccgtagtgaaatcttatttatagtacttctccagtaattcctgcatctccggatatttctcgtcggtgtcacctacttccttgcgaagattcaataaatcttttttcatctgtctgatgataggagcgtatttcggatcgttatacaaattatgattctcgtgcgggtcttcttctaaatcatagaaatcccatgcaggagtgaaatcaaagttttccgtatcggtcatgtccagattctttgcgtaatagaatatgagtttgtagcgctcggaacggatagcgaaatgtgccgggcggatagcgtgattcgtccagtaacggtaatagatttctttccgccagtctgccggagtttttcctccgaggttgccggtgaagctgtgtccttgtacattctccattttcactccggcaaattcggccagtgtcggtgcaaagtcgatgttgagtatcaggtctttcaggcgtttcccggcggggatttttttcggataacggatgacgaagggcatacgggcggcttcttcataaaacattcgtttgtcgaagaagccgtgttcgccgaggaagtaaccttggtcggagacataaacaacgatggtgttgtcggcaatacccatttcgtccagtgttttgaggagtttgccgatgttgtcgtctatggtggctccgcaacgcagatagtcgcggatcagtttttgataaattgcacgccgggcggtggtccgttgcattccgtcggtgttgaaaggtagtccgggatagcggcaccaccacttgtccgggtctttggaagcaactcgccagcgatgtcccagttcttcgagcgtttgcccttggaaagaacgcccgttcgtttccggtccccagtcgaggaagttctccggttcggggaaggtgactccgtcataaaggtgttccatgcgtgtcgggtagtcgtatggctcgtgggtggctttgaaatggcagcacatcaggaaaggctggttgctgtcctgctgcttgatccagttgatcgctttttctgcgacgaggtcggtggagaaaccgggcacgcgctcgccgaacggacggttgcccggccatgggtcgctgctttcgatgaaagtagggtcgcggtattctccctggtcgtagaaaatggaataatagtcgaacccttgcggttgcgatttgatatgccatttaccgacaagtccggtattgtagccgttggcttgcaggacggttgccagtgtgggaattgaagtatccaacgaatcggctaacgtataaagcccgttccggtgactgtaaagtccggtgaggatactggcgcggctgggggcggagatagagttggtgcagaagcagttgtcgagcactacaccttcgtttgccagccggcggatattgctgttataagcataatctgccagaactccgccatagattccccatgcctgtgaggtatggtcgtcgctcaggataaaaaggatattgggccgctggcttttatccttcgggtcttgttgttggttttcttgtccggcaaattgagcaccttgaatgtgtgtcattgctccggctgccagcaggccggttagtattagtttattcatagatatataggtgttgcatttcttcaaatataagtttgtgcttacatctatttttttattgtacgcctaaagatagagaatattttactactttctgtctttaggcaagttctttttactattctgatcgtatttctcatagcttcgccctgccataataccccggcatcggcgcatagatcggattataatacgtattgatattctgcaatttcttttcctctttcagccgtctgatgtgccgggcggcagtggtagcggtaaagttgcacagcccttgaaagtcggggcgcgtcaatatcgagttgttgctgaagtaatttgtcaggagcttgtcaacctcttcgttcgtgcgggaggctgaatgccgtttcactttgcttcgttccagatgtacgacgcttaccgactttttaagtttgatatccgccttgaaactgatgttggctttgagtttgatttggtttgcctttagtttgggcgaagtgattggttcctgactgttcagctttatctgaaagtaaccgataccatccaaatggacgctttccccttcccggagccgctcccccataaagtggcttagagattcgaggacagattttacgtctccctcggtcagtgaagttgccgtttggatttgtctggccagataatccgtgtcgatatgctggaagttgaccacacgtgcgtggtatgtctctttgtctgcctcgtccttgggacggggagttttgtacaattcaaattgtattgccattattttctatttattttatttgtaaggacatcgtattttgtcgttgcaaaccgggttaataatctttgggacttagaggggattgtgttatatagctgttgtttgtttgttatcaagcggctttatataagttgtcctgcctttattctttgattaaggcataaggatagttgtgttccggtgccttgatcgttcgtttgtcacagccgtggtaactacttgccacggctgtggtagcttctcgtcatggccgtggcaggaattcgtcacggctgtggtgagtagactatatcggtagcaaagataaactatataagggagaaaagcaaagtattcctgcttgtttaaggaacttgttcaccttgtcatgatgactgtatatgcttggaaaggggccgaactatattgcgaagcgtaatccggcggtgataggtgatagatgtggtgataggttaagaaacaacctgtcaccgctggaaacctcgatgaataaagcgtttgattaccgacggtgataggtgaaagagaaatgtgtgttttttatcgggagagataaggattaatttgctctcagtttcttctgatattcctccgaattgagaatctccaacgccttctgtacgctttcgttcgtcgtattcatcacccggaaatattcgttcatatcccaaaggtcgcgggcgatcaaggctttgagttgcgtcttgatgagcgggagcgatttctgatactgctcttcattgaacttcacgccttctttctcacccatttcacgcaaggttgccagcatatcatcgtctatgatgaacttctcattaaacgattcgaacttcttgtacttgttggccagttcctttcggtgtccttcgataaacttcatggtgaatttgataacggcgcctttggctaccaggttgcggtgataatccgtgtaaagagtggtgtcaatcggcacgaaataatccggcatgataccgcctccgccgtaaacggtacgaccgagtttcttggtctgtactttcaatgagtcggggaagtgaatgctgtcggcattcatcagttcaccgtggttgaagcgctctatcaggtctttattgtaatctgtcgagctgtcgtaaggcttttggatgcagcggccggcgggagtataataacgggcgatcgtcaggcggatcattgagccgtcgggcaagtcgatcgggcgttgaaccagtcctttgccaaaagaacggcggcctacgatgatacctctgtcccaatcctgcactgcgccgctgacaatctcactggcggaagctgtatattcgtctaccaatacgatgaggcggccgttacggaactcgccgttacctttggcgtagaagtcactgcgtttggcagtccgtccttcggtgtagacgattaattccttttgacccaaaaattcgttggcaaggtcgatagctgcattgaggtagcctcctccgttgccttgcaagtcgagaatcatatccttcattccttgcttctgaagttctttcattgctttcttgaattcttcggcagtcgttgccccgaagcggttgatgcggatatagcctgtcttcggctgaatcatataggacgcgtcaaggctgaggataggtatcttgtctctttttacggtgaacaccaacgggtcttggacgccgcgacggacaattttcagatttactttcgagcctttcggaccgcgaagacgcttcatgatttcttccgtactcatctttacacctgcaatggcgctgtcgttgacggcgatgatacggtcgcctgcaaggattcctattttctcggaaggaccgttgctgacaggttgcaccaccaacagcgtatcttcaatcatctggaattgtacgccgatgccttcgaaattaccttgaagcggttcgttcatcttcttcacttcttcggcgtccgagtaggtggagtgcgggtcgagttgggccagcattttaatgatagcttcttctaccagcttgtcttcgtctactttatctacataaaagttggagattgcaaactctgccatttgcagcttgcgcatggcgggcgagccgaaactctgggcttgtacggctgatactgtccataggcaagccaggagaacgtatattgtaatcttattcataatcttgttattttaggttctattcttctcaactgatcttcatccctttcggaataaactggctgatgtctttattaaaggtcaatagctcgcgtacaatagtagagctgacacaagtcagttccggctccgtgaaaagcagaatggtttcgataccagccagtttgcggttgatgtctgcaatcgtttcttcgtattcgaagtcttttacggtgcggataccgcggacaataaactttgctcctacttcctgtgcgaagtcaattgtcagacaatcgtatgacattacccggatacgagggtcgtctttgtagagttcccgaatcatttcctctcttttgtcgatagggaaatacgtattcttgttttcgttgataccgattcctatcacgatttcgtccataaaggtgagtgcacgttccactaccgaataatgtccgatggtgaaagggtcgaatgtacccgggaatattgcttttctcatgatgccaagtcttcttcaataaccaagttgtctataataaagttctgtcgttccatggtgtttttgcccatgtagaattccagtagttcttttactgcgtccgttttacgcaatgtcacttgttccaggcgcatatctttgccgataaagtgcttgaactcgtccggtgagatctctcccaatcctttgaatcgggtgatttccggattcgggcttagttcattgatagcattgacgcgttcctcctcgctgtaacaatagagcgtctttttcttgttgcgtacacggaacagaggagtctgcaagatgtatacgtgtcccttcttgataaggtcggggaagaattgcaggaagaaggtaatcagcaacaggcggatgtgcataccgtccacatcggcatcggttgctacaatcactttgttgtaacgcagtccttcgattccgtcttctatattcagggctgcctggagcaggttgaattcttcgttctcgtacaccactttctttgtcagcccgaaagaattcaacggtttaccacggaggctgaataccgcttgtgtgttgacatcacggctcttggtgatggaaccgcttgcagagtctccctcggtgatgaagatgcaggaatcttcttccagcccttttcctttcgggtcgttgaggtggatacggcagtcacgcagtttgcggttatgcaggttagctttcttggcacgttcgcgggccagtttcgttacgcctgcaatggctttgcgttccttttccgattcctgtatcttttgctggatggcttcggctacgtccgcattcttgtggaggaagttgtccacttccagtttgatgaagtcgcctacgtatttattgacggtcatgccgccgggcgccatgttggtagaacccagctttgtcttggtctggctctcgaagatcggttcctccacgttgacggcaatggcggcaacgagtccgttgcggatgtccgtataatccatgttcttgttgaagaactctttgatagtacgggcgatatgttccttgaaagcactctggtgagtacctccctgggtggtgtgctgaccgttgacgaaggagtaatattcttctccgtattgtccggtgtgggtgaaggctatttcgatgtcttctcctttcaggtggatgatagggtagaggccggttgccgtcatgttgtcattcagcaggtctacaagaccgttacgtgacaggatgcggtgaccgttatagataatggcaagccctgtgttgaggtacgtatagttacgtagcatggtctcgataaattcgggcttgaaacaataattcaggaataatgtattgtccggttcgaagaagatataagttccgttgtcttcttcggtggtctgcgtttcatcagtcagcagggtacctttggagaaagtggcgatgcggactttcccgtcgcggtaactgcgtacctcgaaacgggagctcagtgcgttgacggctttcacaccgacaccgttcaacccgacgcttttcttaaatgccttgctgtcgtacttaccaccggtattcagcatactgacggcttcaatcagctttccttgcggaatgcctcgtccgtagtcacgcacactgacacgaaggttttcttcaacggtaatctcgattttcttaccggcttgcatcttgaactcgtcaatactgttgtcaatcacttctttcaggaggacatagattccgtcttcggcatgtgcaccgtcgcccagcctaccgatatacataccggggcgtgtgcgcacatgttccatgtcgctcaggtggcggatgttgtcgtcagtgtactctactgcattgttgttgtctacaggtatcaattcgttctcttccatagctgtttttttattttatctctttgatgaacgcacggcggcgcttatgttgttgagtctcaaagtaatcccattgtgcctgaacctttccgttcagttccagttcggggttgctttccgcaaagataaaacctaatttttgataaaccggaattaaatcggaaaataacaaagcgttaacacctttattctggtattccggtttcacggcaacaagtagtaaatcaagcattttcgcacgtcgtttcatgaataatgctttcaacagatagaaccatccgagcggcagcagacgtccgtgtgacttttgcagcgcttcggcaagcgacggcatggagatacctacgcaaaccagtttgtcatcggcatcggtgataagagtcaccattcgcaggtcgagtatcgggaggtacatctttacgtactggttgatttgtcgctgcgtcaacggagagtagccgtagagcgggctgtacgcttcgttcatcagttcgaatatttcctgtccgtagtctttggctatttttttcccggaggtatatttttttatcttgaggttgtattttcgttgaatcagttcggagatacgcttgtgcttgtcgggaatggcgtccgggatatagattttgtattccacccagtcggcgtctttctcgaagccgagtttctccatgtgtacgggatagtaggggtggttgtagatagtggccatggtgctgagttggtcgaaaccttcaatcagcataccttccgcatcgaaatcggtgaatccgagaggtccggcaatgtgagtcatgccccgttcctttccccagtcttctactgttttgatgagagcggaggatacttcagggtcgtcaatgaagtctatccacccgaaacggacgttcttgcaaccccatttctcgttggcacggttgttgataatggcggctacacgtcctacgatcttgtcatcctggtatgccagaaaataatctgcttcacagaattcgaatgctgcattcttacgcttgttaaatgtattgagcatatcgtcgtaaaggtcggggacggagtacggattgcccttgtacattctgtaattgaaacggataaatttcttaagttctctctttgtagagactttcttgattgtaatagccatatctcgtatttatgattgaggaagcaaagatacgtgataatcttcaaagtacaacgcagagggtggcaaaaactgtgtgagaggcaggtcggttttggaaaataaaaagcaattagtagttgtttaaactgaatttagggctacctttgttcgaaatactataacacatatcatggaactacaaattattcagaataagatatatgagattcggggacagaaggtaatgcttgattttgatttggcggaactctatggaacagaaacacggttattgaagcgtgctgtgaggcgtaatatggaacgttttccagatgatttcatgtttgaattgacaaatgaagaggctaactgcttgttgtccagtagggtatcccaaattgggataccccaatataattttagtgcttacactccatttgcgtttacggaacagggggtagccatgctttcaagcgttctgcattcaacagttgctattaaggtcaatattaatattatgcgtgcctttgtcagtattcgtcaatatgtcttggccagtgataccaagaatcaagaaatagacgaactgagacagcgcatacaagaactggaaagtcaaggaagtaaagcattcgcaatgattaaccaaatcggcgaggagactttggaagccataaacgacctcagtgaagatacccggaaggaattggatagtatttatctggctttatcagaattggccgataaagaaaaaacggaatctctgaaatcaaagcatcgacgaccgattgggtttatacattacgataatgaggaataagtttattttgatataaagcaataaacatttcctgcaaagtcacagacaatcatccggtttcctgatacggctacggttgagaatatcggtgctccgagattatatttgtcttttataattcccgttgtccggtcgatagcatatagataaccatcggaagctccgatgtaaataactccttgtgatgccactgggcttgtttctactccggcttgcggagtggtggaataaggagctgtgtataccagcgaaggcaaagtctctgctctccatttattgaaaagcgtagctttgtccagtgcgaaaactccgcggtcggcagtgccgaagataatttcctgttcggtaataagtggtgtggatgttacgtccaggttggctgacaactctttctgttggagtacttttccggtttgcggttctatgacgaagaagcttttggaggagatgatccataatttcccgtctttatagaccggagaggctccccggttacgaagtccgttatcggagagtttccagagttgttttccggtgtgaatgtcgttaccgtataatcctccccattgagttccgctgactaatacatttccggcaacagttagcgttgtagtagcaccttcccgttgtctccagtccttgttaatccatattgtttgtcctgtctttaagtcataggcggatagtccggcaccaattccggcgtagactactcctttatctattgttattccttccgttaagtaaggatagctgttcagtttgatatattgtttccagagtaattttccggattctgcatccaaagcgtacagattgcaggcagcgtcctgtgctattacaattccgttttcataggcgattgtgttcttcaccgagtttgccgtgcggaatttccataacagtttgccggaattgaaatcgaatgcacagacaaatgtgttcagtggtatattgtcatcggtggtagcgataaatactttctgtccggcgataataggggaagccatgaagatgttgctgcctgtgttggctgtccattgcagttgcagggggagcttgatttgagaattattgattcctccggagtgtgcggcattttgaagcagggtattccagtcctcgcccgggattgtagccggcttgaagtctttttgataagtgaatcggctggtggcggttgctttcttgccgtcattaaagaatgaagttactgtgagttgtagctttcttccgttttcattcgcaggcatttgaatgtctctgctccagttccagtcggtgagggagataaggttgcctttggctatctcctgattattctctatatcgcttaggatgtaggagacgtgtgatgttttagcctgtgcatgataggtattgacagaaacaggaagccggtctccggtagctgcggaaatttgattgttcatcggggagactatggcaatctgcggctcgatgaaggtataccgtagttgcgttgtgatattgtcattgccgtctacttttatttctctgaaagaagaaggagaatggtcgataccgcctttatccaatgtaccggtacagattgtatagattccgttttgattgcggacatagttgtagtgcatgtgtccgtagatttgggcttttgtattgaaagcacgtaggtcaagtgtatgctctttatcggctttgaatacgaatgtgtcacttgcggtaaacaggtcatggttgaagaggatcaatgcctgttctttcttcatcatggcaaggtcattcttcagccagttgtatacatctttttgagtataattagtcgggtggtctccgtggtcgattggggtgactacataatgaacgttacccatatcaaatgagtaccacgtcggaccatagagagattcataaagctcttcgccatagctacctttcactaagtcgtgattgccgatgcagtagtaaacggggcaatccattgtctgtgcgttcactatttggttatgcattgtcagccccggttcgtaacagatgtctccggtatgaatcaggaaagcgggcttttcattctttacatattgctgaaggtcagttacccaacgtcccattccaccggtcacttcggtatcggtgatttgaacgaaagaatgttccctggcttttgtccgttcactttcagttaagataaagtcgtagctttttctattctctttggtggaaagatagaattgctccgtttcaaatccggcgggagttgtaatgctgataaatcttgttttatcgaatccgggtaaagagaaccgacctttcttatctgtttttactacgttcaagccgtctgttaccataactcccgccagcggtttatcacctttattaaatagtcctgattggtcggtgtcgacatagactgttcctttaaattgagcgcttagtggcagatatagtaaaaatgatactaggataacagataatcttttcatggtcagtcctccggtttttagtgtgttaagctaattatttctttttatttcacttgtttcatttcttcattgtaacgtgcttcttctttgcacaaaggtttgtaccaagtcttccttagtataagtgtggtgactaaaagcaaagtgatagagctccagagccccagttgctcacggacaacgagatacatcggaatgatagtaagcgcacattgccagatgataccgattgctacgttgaaagcatcccttttgaagttcttgttcggctggatatgaggataacgcgccaatgctttttcttctaccggtttccaccagccccatgggcggacacgggtgtagaagttgatcagtgtctcttcgtcagtcggaggtgcgctatacgttccggcgatacatcctatcagggaaaccccgaacagaacggggaagaaatacaatacccatgcgtcgggaacagtgaatttcatgacgattgccgctattactccggcagtcattccccagaaatagccttcaccgttgaaacgccaccaatgccatttgagtacgttggctgcgatgtatccaccaaagagtgcgcctacaatccattggaagatttcattaatatctttcagaaagaatccgataacggtgctgaccactaccactgcaacagaaatcacataactgctgcgtatctgcgtttttacactcgctttcggattgatgtatttcagataaatgtcattcactatatatgcaggagccgcattcaccgttgaagcgaaagtagacatgaacgctgccagtagtcccgccaataacagaccggctaatccggaaggtacataacgggtaatcaagtgaggaagaatcgtctcaaagtccgttcgtgtaacttccatttgtgtcattccgccgtcttccttgaagaagtaaatagccagcaatgcgaatcccataatcatcaggtagcgagggattaataacaccacagatacagaaccactcatcattgccgcttctttcggagacttgcaggacagaatcttctgcatatcatagttaggagcgggaccagccatgctcataaagattcctttcagcaacgccatcataacaaatatgcttatcagactgtaaggctcgttggccattcgctcggtaaggagattcatccggctgctccagtcgatatcaagtgtccagccgaagaagggcgaatcccagccggcaggaacaaatgagtgaatcatgtccggtgccaccatctgcataccaatgacgacaataacgatgcctgccacggtcattatcagaaactgaacgacatctgtccatacgatactcagcattccgccgagcatcacatagaatgtggcgatggtagtaaagaaaataccatatacatgaggaacatattctgcaggaacattgaaaggaataaatggagatactacttcccaagggatgaatatctccataaatttaccaatacctatgaacccgtaacttaaaaaaccgagtacgctaagtaatgcgaatacgataacaatcgtatgtgaaagagtagaacctttcccttttccgaaacgggttttaatccattcggcaccggtgagaacgttcgaacggcgcagccacacggataagtaaaccattaggaatatctggttgaacaccggccataaccagggaatccaaagacttttgaaaccataagcgaatgcccagtataccataagcattgtgcccgtaatatcgaacattccggaggcgttggataatcccaacatatagaaaggcaatgattttccacctaagaagtaggagtccatattctgggctgcccgttttttaagaatgagaccgatgacaatcatagcgataagataggcgcatatgataagaaggtcggtagtgtgtaatttcatattattattttgaatcgatttatatattgtatcttctttgctgcaaaggtagggggaaagtcttgggcaaacaaatattattttagcacatactgatactaaaccaataaatgtttcttattccttatggtaaattagttcattcctaagattccatgcttgtatatgttttatgccattgtgagacggtaagaccatatcatcaattgatactaccactttcggaaagttatcattaatggtttccaatggagaaaattctctttttatggtactttgatctgacattatataagagcattgtatataaattgtttctcctgttttttgagccacgaagtcgatctctttacctttggcattgccagtgtaaacttcatatcccatacgaagtaactccaagtaaactgcgttttctatcaggtagccaaagccataaccgtagccgggatagagataatttttataagcaaggtcattaatgtagaacttacttgtcccagcaagggtttcttttcccttgatgtcataacgttcgcaacgatggattaagaatgtgtcttcgatatatcctatataagcagctacaatatcataactaatgtttctccctgaatttttaaagtatttcactatgctattgaccgatatcaggttggaagcgttgtttactaaaaagataaaaatatcttccagtaatttggggtcacgtatattgtaacgttggataatgtcacgcaacaaaatggagtccttaatagtagacatatagttttgtctgatttccagtttattcgggagagaaaacaactccggcagaccaccactatttatataatcaagataactttgtttcatttgctcttttccggttaccataagatattcctgataactgaaaggaaaaacattgaaacatacataacgaccggataataacgtagccagttctcctgaaagtaatttagagttagaaccgcttatgaatagttcgtattcagctgtatagtcttgtgaataagaatttattgtcttttcccaatctttgatgagttgaatctcatcgatgaaaatataaacttttcctgttggttgtataattgcctgatacagcttgatgatttcatctaagtctttgtaggtctttatgaaatccagatctgtcatttctctgttgatgaatagtgtatttgcggcaggcacgccattttctatcagttgcctggcagtctgtcgcaatagataactttttcctgctctacgctgacctgtaaggattttcacaagtctgtttcctgtaaagtccataatcttttcattgtattcactacgcctgaatccaaaatcaaatgcagtgtctccccaaagattatactttcttagaatgtttatcctttcgtccatatcctaaagtttttagcaaaaatacaaaagtttcggatatatccgaaacttttcttgcttttgtttgcgatttcgaatatatccgaaattatttgttttaaagataaacttgttctgtttctactgtaacggctttgttagcttctatgagattgcaaatattttctacggaagcagcagaacgtaaaccgtctgccggtgtgtgaaaacaataatcgatcagtctatcaatggtggaagttgctacatgcatacgagtatccgaggatgcataatagatatatactgttccatcttcatccgcaatccagccattcgagaaaagtacattagatacgtcacctattctttcttcatctatcggagccagcaaatatccacccggttcggcaattgtctttgtcggatcttccagagaggtcatatacagatagagtacataacgcagtccggcagcacaagcccgtacaccgtgggcgaggtgtaaccatcccttggaggttttgataggatgaggtccctctccattcttcacctcttttatagtgtgatagtgacggtggttgatgatagtttcttctttcacttctgcatgagtcatatcatcaatgagtgcccaaccgatacctccgccgtttccggcatcaataaagctatcttgcggacgggtgtacaaagcgtacttaccgttaacaaattccggatgtagaacgacattacgttgttggcttttggaaatcaggttgggtaggcgttcccaattcttcaaatctttggtgcggacgatacctgctttggcaacggcggaagataagtcacccggtgcagcgttggggtcaaggctttcgctacagaagataccatatatccagccgtcttcatgtgctgtcaggcgcatgtcgtagacgtttgtttctgtcggatcagtatccggtagttgtatcgggtattcccaaaaacgaaagttatctattccgtttggactttcggcaatggcaaagaatgacttacggtcgttcccttccacacgtactgccaacaagtatttgccgttccatttgatagctcccgaattcatggtggcattcactccgatacgttccataagccaagggtttgtttccggattcaagtcataacgccattccaaaggaatgtgttttgcagtgatgacaggatataggtagcgttggatgattccgttataatgactattatcttctttattcttgcgagtgagaagctggaaatataactctttgaattgtttaaatttttgcttattataacttgacataaggtttttctttttaacagatcctacaaatgggcgattataagtggacttttccaaccaatgtaacaatactaaattgtggtattgtcagattgtagtatttattgcttacgggaacgatatttgttttattccatctattgtctttattagtaataaattgctttaatgctccttttatatttgctccgtctaggcgaatgttggtcgatattgttttttcagataggttgattgcaactaagatatatttatcgttctttttatatgctgatactaaaaggtctttgttcttaggttgggttacctgtattcgtgtacttccttcagaaatatatcgagagtaattgcctaagatatcatacctttttgataatgtataatcttttctatttttgttcaaaatgataagactttcattgttggatgtcggcatagctcctccccaccatataattgcatttacatttgccttagtcagataattgtggaatgtaactgcccacttaagtccatcttgaattgaagtatcgagtggggttacatcacttatttctgtaatccataccggtatgtgcgctttttctgctgcgtcaaatggaatgataggagttttaagatattctttatctacttttattggcattatgtcaggagataagctatagccatgtcctgctgcaatgagattgaatttcttgatttcaggatagtcctgaagaattgtatctgtgaagtctttggatgagaccatctttagttgaggcatgactactgaccataaaggattctctccaaatatgatttttgcaggaatattttctttctgaaaggtgggaccaagattggaagtgataaatttccccatttcgtctgctgtccataaagaagaattccagggggcggcataaccaggctcgtttgagggtgatatggcataaggtgtaattcctttggatttgtaagctttgtaaaaagctgcaagataattagcgaaatcctgataacactccggtttgagttttccgtttgatacttttccgttgcttttcatccatgcaggagcgctccatgtagaaaaaactaatttgttgatatgatatttatttttagcctctaaagtaagccataattgtccgcgtctcaacaaatcatcggatttattgttaaaatcagaatcgcataactcgatgttaatatcatcgttaagattgaagtctttatcttctttattctcccaataatgtgggaaaatctctcctcttaggatgtttaaacgcaatccatcgttaccgaacattttatccatgacttgttttctgtttttgaaagcgaacagttctttagcccagccagcttgggctattccaaatccgtctattgtttgttcgcaatcgttccatctgattacgatgccggagcttggcgaattatctgaaattttagtagcagggttgctgaaacaaactagactagtaaatagtgcacttaaaatggggatgcaatgtagtttcatattttcagaatctgatataagggaggtagctttttctttggtaagacaccacctccctaattttattaatatctatttaccgatcacgcttatgttagtcgatatcccaccatatatgtgtggtaactttgtctgctccttgttgctgattcgcagtatctacatttgctctgttaatactatattcatcggtaggataagggagtctcgtagggataactcctgggctcatactacctgaataattggttggaataagtttggggtatccggtacgacgccagttggcataactttcgtaaccgttgatgaaagttgctacccagtattgctctccgataatttgcagtttttccgtattgtttgcagtactgaataggttctgggctaagtaagtctcgatttcttcatctgtgattttaccttgcgttccgtaagcaatctcctgttctttcatggatgatgtgatggcttctttataaagaacctccgcgtttccgtttgtccagtttctcaatacagcttcggctagcaacaatttcgtctcagatggcattaggaagatggtaggggcatccaatctcaaaattgtattgatattgaagttggaagtattttctaagccgacaaagcttccacttggggcgtctgcaatggtatgactatcgtaaccgttaggtaaaccaaattgtttgtcaaattcagtatttccgtctttcaaagagcaatatacatgaatacgaggatcttttgtttttttgagataatccatgaatgttttcccaattttgactgcatcactttcgatgaagttgtcatctagataacggaaactcaatggatttttaaatgcatttttcccgcttccgtcatgtctcagaaggcatatatcttccggttggctcattacgccgatagttacggcgtcggctactgtctgttttgccaggtctggagccacttctgacagacgcattcctatacgaagtaataaggaacctccaaactttttccacttattgatgtcgccatcgtagaataagtcaccgtctattgccggattattggcatttagcaggttgaccccgtctttgacttgctgaatcatatctttatagatggtctcctgattatcatatttcggcttatagatttgctgatagtatcctaatcctgcttcagaatagggaacattgccgtatatatctgtcaaacgctggaacagataagcgccccagatttttgttgcaccgaggatattggaatattttgcatctgacgaggctttttcttccaattcgcgccagttttttatcagatcgctataagtgtcggtaaagaaggtgttggcgtaagattccatctggtaatatttgtcacctggcatatcgttatttaaggaagcggcttgctgtacaagcatcatgcaggttcctacctgaatgtttttagcaataccaccggtagtcgtatgtaattgagtataggtcaacagaggaccgggctctatcgaggtaggactgttggggtctatatttttctcggtgaaatcacaggcataaaccatacaagttagcgtggatgccatcattagttttattatattgatcactgacataatatttttatttaaaatttgacattcagattaaaacctatgctacgtgaggcgggtagtccgtaagattcgaatccctgtccattgtcgatattgaaagaagattcgggatctaccaaaggtactttatcgtagatattccacaaattccgtcctacgactgagagagacaaggctgacaaacctattttacggatccattttgtcgggaagttatatccgaaagaaagttcgcgcaacttaatgaaagaagcgtcatatatacagttctcggtaatacctgacaatgccatataatatttcatcgctgtcacttttacatcatttggagttacaccgtcttcttttactccctgagcgataataccttcttcgcgtcctggtagcgtgtctgcatggcgtccgaacataatcatgtgtgcatttgtttgagaatacatctttcctccgaatttgccatcaagtaagaaactcaatgtgaatccgtgacattcaaatgagttgctgaatcctaatgtgtatggatgcacgctttcgcctaatttctcgatttctcctttcataggaagtccattttcgtacatgatttcacctttgtcgttgcgtttgaaagttacgcctcggataatcccataaggttgtcctacttgctggtaaatccaagctgggccacagttgtcgctatcgtggccagtacgagactttgccagttcgaattcggtgacatcatctgttatgcgtttaatttcactcttgttgtaagcgaagttgaaggaagtgtcccaacgaaagtgagatgaaagaattggagtgccggtaagtaacagttcaataccatgattattcactttacccgcgtttattttgacatttccatatcctgacgcggttgatatacctgcgtttactatatcgtctttagtatttcgtacatagtatgtgaaatcaatgccgaagcgattgttaaagaacctggcttcaaatcctccttcatacgaaatagaagtcagaggttttaaatttaagttcggaatagtgccattgtcaatggatccaacaggatatttgcgatatgcatccgcataactgtatgtcaatcccagttgataggctccaacggcgccgccggactgtgcccatgaaccgcgtagcttgaggtatgggaaccaagacggcatctgaatagcttcactaaggataaatcctaatccgacggagggataaaaaatatgattgggagaggttttccctttgtaagaaagtgcggaaaaccagtcgttacgtcctgttaaggtcaaatatatcatgcttttataagacatttcggcttgtccgaagagggagttgatgtaactttcagaagtagaatgaccaccggattttgtttttgtattattaatggtgttgaatcctggtacaacaaattggtcaccgtacgaacttgttgcatctgaccaacttgccattgtgttccagccaataaatgcatcgacacttacaaggccgtctttgaatgagttggtatatccggcaatggcttctgtgttgaattcaccgtgatattcggcactattggatatattaccttcttttacagctccgcgggctgtgccccaaggggtgacattttcggcacgacggttaatcatatcaccgccggcacgtccgcgtagataccagtttggtgtaaagttgtattgaacttcgacggagccaataatacggtctttagcatctttttgactattcttgtaaacaacaaataaaggattgattacatagccttgagcgtttacttcatattccgtaccatcgtcgtttgtaatcttcatatcagaaaggccgtaattaggtgctagttgccataaagaagcatttgcattggaggtaatatcacccaggtttggacggtttttggcacgttcgcgtacgtacataatattggcctttagtgagaagtgctcgttcattctagaagtcagattcaatgtaatattgttacgttccagtttggaattcggttgcatatcatgaaaacgttgatcacctgcaccaacacggaactgaattttttcatttccgccggatacagcgatgttgttagtcactgaccatgcattgtcgtagaaatctttgaaattatttcttgcggttggtgaatatgggcgggaaattccgtcatattgcgttacatttgatccgtccattttgctaccgaagctcattacactcatttgcttggctaatgttggagccaattggcttatagcctgttctggtgtcattccatatccagctcctgtcgctatagccagttgatcaggattcatcccatttgcaccacaaccatattcccattggaggtcattattctttaggatgggagagtctttagtataagacatattgtattctactctgacttttcctgctgttccttttttagtagtaatgacaattgcaccatttgctgcacgggaaccgtacaatgcagcagcggtacctcctttcagcacactcatactttcaatgtcttcactattgatagatgaaattccgtcaccagcatcaaaaccaccccattctccggcttgaccatagtttccgttattcataggcacgccgtcgatgacgtataaaggttggttactaccgttcaaagaaccgttaccacgaattgttatacggcttgaacccatgacgccggatgctggtttcactacatttacacctgctacttttcctaccagactgttggctatattggaaaccttgacacgattcaactcttcgctcttgacttccgttacggagtaagctaatgcttttttctcttttttaatacctaaggcagtgacaactacttcatctacttggacagaactctcctgtagagtgactttcatgggggtatctgtagccttttgttctactgtctgatatccaataaatgaaaaaattagggtatttcctttctttgcacgaatggtgaactggccgtccatatttgtgattgttccaaaggttgtgccttttatactaatgctgactccgggcagaggctcgccggaagagtcggatactattcctttaatatccgtttgttgggcatgaagtgaactgcatataaatagtaggcagcacaataataaataagtaatgtttttcattgcgaatatgattttagttgttaaactctgggagcaaaggtagggtagtttgcggtggaggacaaatatgattttatcaaatactaatacaaaattaacaaaaagcataaaaatgagtaaaaataggggtttaaactctttgatataataccagaattctgaaaccgatatgtttattagtgagtatcgttctgttttgtaaaatctaaagtggcattttaagggtgtaaagcatagctttgtattgcttaaaacgacgcttttcaaaagctaaaaagtttgtttcattttattattgattatcttaatgtctgactatttacttataagaaataaaatgaataagccggaatattataaaaattttctgaaacggatattatctatatcaataaagagtttgcggaaaatacctgcgatacttattgtactgggagtaatgttgctatgctttcgagcgaattagccacttttctgagtggtagatatatagaatttaaggtatatagtcttacatatgccgaaaatttctggagtttcataaattagaagattctgttgaagaacgcaatggagaaaaattatatgttcaggtagtatattcagttattgactctaaaacacatgagtgggaatttggaaatttgttggcatacaagataattatccgaaaatagttgttacaatggatgaaattgagggcgtttcttatcagggtatcaaacagatccctatccgtcagtttttactttgttggagataatttttctattaaagaaaaaagagagaaaaataaaaggagaagcaaaacatcattagcttctcctttccctttccagtatataatctcaaagcgattatttgaaaacaatcttcattggtctacctatccaaacttgtggttgttcgaggttgaaaatgtgagctattgtagaagctacatcatattgcatcatgcttacatcatcaaaacgaagtccttttttaatattcttaccggaaatgatgaaagcagtttccatttcttgcattgttttgccaccgtgacccttcttgatgcctccatggtcggaagtcaatatgaaaatagtgtcatcaaggatgcctgcatcttttacggcctggacaatctggccgacataagtatccaactccttgagtttctcataatatgcgggagtgtcatgtccttcagtgtgtccggtatggtcgggactatcatagcagatagcaacaagagtcggatgtttctcctttatgtaagcagatgccatattgcctaactctttgggagtcttgttgtaatcggccacatgataatgatagcttagagaaagtgtatctactaaatacttgattccgttccattcatacagacagccgatctctgctttcggacgggcatcacgcagtaattggaagatagtggggaagattccattcttgtttaaaacacgtgacggaagttccggagttttagatccccattcggtgtatccgtgaagttcgggaccggctcccataaacatggatgcccagttgatagcactggacgaaggaagtgccgagcgttttttgagcgtgtaagctccgtcttccattagtttcttgacattgggcatgtctgctttaggcaagctgtaagctccccaaccgtccagtccgatgagaacaacatgtttggctttgtcttttcctttggcattgcaggagaatgtgaaacaaaaaagcagtgcgaatgtagcaagtagcgtaaaagcgttttgtctattcatgatattttccattaagtaattaatattgttgatttaatgaattaagttttctcatgtattattttattagacaaaggtagagttattctgttggtggaacaaatacaatcttagcattaactaatacttttgcattttttatttcaaactcagccggaagcttttttatctatgtattataaatcaataccacggtatatgctacatagcagagtatcataatgcttccttctatccgtgtgattgtccgtttggcgaagaacaatccgaacagccagagcaggatgcacgagccgaccagtgtgagcaagtcgaagttggtgattccgctaaggtggaggggagtaatgctggcgctgcatcccaatacaaagaagatattgaagaggttactgccgattacgtttccgatagctatttccggattcttctttagtgcggcaacgatagaggtggcaagttccggcagagaagtccctccggccaccagtgtcagaccgatgattgactcgctgacgcccagattgcgggcgatacccgtagcctcgttaacaaataattgtcctccgtaaattagtgcagccagccctccgataatataaagaaccgatttccaccaggggagcaattttatctcgttctcttcttccggtacgggatgttcttcctgtccccctgtggagggcttggaagcgatagcaaatgtatatcccataaagatagcgaagaaacaaagcaataacagtccgtctaccctgttcaggatattttccggtgctttatccagaaagacgtcattggcgcaaaccaacaggacgacagaagatagaatgcagagcggaatctcttttttgagtgtattccgggtgatgacaatcggagcgaataaagccgtgcagcctacaatcatcagtgtattgaatatattacttcctaccacattacctatggcaatgtccgcactgcctttaagagcagaagacacactgacggtgagttcgggggcagaagtaccgaacgcgacgatagtaagcccgataacaatggaggggatacggagacgtttggcaactgaagcagccccgtccgtgagtccgttagctcctagaagaatgaggattaatcctccgataagaaacagtatattcatgtttttttctcttttggtggcaaagataatcattttcaaaattgatatgtcaaaaacaatccgtatgtttgctctgttttagtgaaaaaatagattaaccttaattcactgtcaggggatataggatatggaaatgaataaaatgaaacgtttagtgttactgctcattgtacttttgggaacaacgggagtacgggcacagttgggagaagctgtcaagaagatatttgcaggtgatagtgtaactaccgtgcacaacacacctctgaaccgggattcagactctgtctatgtggccaatctgcaaaaatccctcgaagcagcccggctcaacgaggcgaatatgcgtatggaaatggagcagatgaaactgcaaatggctgccgccgactccgtgaagtacgcccggcagcgtcaacgtatcgattccttgcggcagtttaccaaaggaatccctgtggtagccgacggagataccttattttatctttttaccaaacgtggcggatacactccccagcaacgtgcgcaaatgaccggtgctgcaattgaagaactgggaagacgttttaacctccgcccggactccgtgtcgatcgaccattcggacattgtttccgatttgatgtacggtaacaaggtgttgctttcccttaccgatcaggatgctttgtgggaaggcatttcccgtgattctcttgcgaaggaaagacaacaaaacgttatcaccaaactgcacgatatgaaagccgaacacgggctttggagaatggcgaaacgtgtgctttatttcattctggtgattgtcgggcaatacttcctgtttcgcctgacgaactggcttttccgtaaactgaaagtacgtattttgcgtctggaagttacgaaaagagtgtaatttattggaaatgagcgtaggttaattgctcttgatagtaataggttacgatttagttagttatctactgcattatccttctgcgcgttgcgtaaccttcaaagaactcttcgtatgcaaaagtagctatttaattcgagattttgatataaactcccgttttttatcccctcattcataagaattttccgtaaaagcggtattgtccgtcggcacaccattgcccaaaacgagtttggaacaaacgtgtgccgactaccgcatagctggagaaaagggcattgcctcacgcctaaacgatgtttagacagatgaagcaatgcccctttcttttgcgcctatgccaagaggtgcttttacgggttttcaaatgatttttcttttttcgctgtctcttttgccggaagcggaaagtgaatgcagagtgtgtcagcctgccccatgaatgaaacaggcgcccacacacagccggacaaaccgggaagaatgattgttgccacccggctgaacaagttccgtcggatcggaaacaatcatacttcctttgttgtggtttgcccttttcacgcttccggtgatgtctttttccttttggtgattcttttttttacggattttcccctgaagtttttttctacacaatctgcctctgttttcgtttacctccattttgcgcctttcagtaagccgcatcagtcagtcattttcgttctgggcgcaaaggtaattccgggattggacgggaaagcaaggtcaagcctcctgttttcggtaaaaatctccagccctgcgggtagtattttgaccgaaaaaccttgcattccctaatccctaccttttcaagcacccgaaacgaaaacgaccgatgcgacagaaagacgcataaaaaaaatgtcggataaacgagaggcagataagatagtttgaaactcaactccctcagctcttgaatccgcattaaaaacaaaaaaatcaaaaacagcgaagatatgacggcaacggcaaatttcagacaaatggcgcaacacatcgggttggcgatatgcggcttgatgatgcgcaccgccttcggggtgttcggcatcctttggggcatcatcagagagattgtaaacggagtgttccgagtggcgataggtgtaatcgtggctatcctttccaccattgccttctttggcttcatcctttggttattcaccctttaacccttaccgacatggcaaaaagaaacagcaagacggcagcgcagcagtgcagatattacgaggtggacaacatcttcgtgtatatggtggaaacgtacatcaacggcaattttgaaactttccgaagattgtaccacgaactgaacaaggacgcacggagggatttcatggacttccttctcagcgaggtagagccgacctattggagagagatactgaaacagataatctaaaaatgacagcgatatgaaaggaacagaccatttcaagagaacgatatatatgtacttggaacagcgtgcggaggaagatgcgctatttgcaaagaagtaccgcaaccctgccaagaacatggacgagtgcgtgacccacattctgaactatgtgcagaaaagcggttgcaacggtttcacggacggagagatattcgggcaagccatccactactatgaggaaaacgagatagaggtgggcaaaccgatggactgccaagtggttgtgaaccacgttgtgaaactcacggcagaggaaaaggcggaggcacgtcagaacgctgtccgcaaataccaagaggaggaactccgcaagttgcagaaccgccacagaccgtcagcgagaaaagaaaaccaaccccaaccctcattatttgatttaggcttatgaaaccgaagaccaagatacagaaagaggtggcaagactttccgccaaccttcgccccatatcagcgacacaaatagattgggcataccgccactgcgttgagcatatcggctaccgcaccaagaaagggaacatcacctgttccgactgcggtcacgagtggcacagcgacagcggactatgcgacacccttgaaggctgcacctgccccaaatgccatgccgaactcaaagtgcaggacacacgcagacgcatctacaaggaaacgcagaatttcagcgtgataaccacctgcaaagggtatcaggtaatccgcgtggcgcaggtcagatgcgagagcaggaaaggcgaaccgatgcgtttctactgccacgaggtcgtgcagcgttggatttcacccgacggcaaggttacggacatggcgttgctccgtggcttccttttctgctattgcgatgtgtgggcattaggcagcgatatggaggtaagaccgcacaacagcctatacgatgatgtggtggcaagaagctgtgcatatccaaagatgaggatattgccccaactcagacgtaacggcttcaagggcgatttccacggcatctcccccgtgcgtcttttcaaagccttgctttcagacccaagaattgaaacccttatgaaaggcggtgagattgaggtcatgaaacactttcttttcaatacccgtactgccgatgaatgttgggcatcatatctgattgccaagcgtcacaagtatcagatagacaacctctcaatgtggtgcgactatctgcgtatgctcaaaaaactcggtcaagacctccgtaacccgaagaacatctgtcccgaagatttcatggcggcacacgacaacgcaacccgaaaaattgaagccatacacgagaaggaaagagccgcagagcaacgccgttgggagattgaaaggcgtgagcgtgagcaacagcgacaactccaacgaaagaaagatgcggaggatttcatcgccaacaaatccaaattcttcggcttggtaatcacggacgaggaaataatcgtcaaggtgcttgaaagcatagacgagtattacaacgagggcaagacgcagggcatctgcgtgtttggcagtggatactacaagaaagccgacaccctcatactatcggcaaggattggcgatgagattattgaaaccgtagaggtggacttgcgaaccctcgaagtggtgcagtgccacggcaagcacaaccaggacaccgaatatcacgagcgcatcatagaccttgtgaacaagaacgccaaccttatccgtgagcggatgaaagcggcatagcataacccctaaaacaacattgatatggaagtaagaattgaaagtatgatttgtgtgtgggatgatgcaatccccacgatgttccttgaatttgtgaacctcctcactctcacaacgagtgagggggaattgagaaagagcgtaaaggagtttgccgagaagcacgaacttgacaagtttttcctttacggcttcggctcacaccatttctacctgcaccaacgctacacaagcaaccccgaaatggtgatgaagaacagagttctgtcagtacatttttaaccatctaaaaagcaacattatgacaacacgaatgaccatcaacggagtaagcacctgcgcggaagcaggtacggagaaatacgagcgtttccaatcgggtatcggaagacgcaggcggacacttgtgcagtacgactaccgccaccccatagacagagaattgttctcttgtgtcaaacccacgttggacgagtgccgagccgcacgggacaagtggctgaacgcaaagaagggaaaggaggacagactatgaacacgacctatcaaacgctgatagtcaagttcagcgaacctatcacggcattggacggtatctttgacgataccggagcgtggggaacggacaccctcaaggggtggatagatgattacgaaagcacacgtttcaccgccaccgacagccatacggcagtcatcacgagcgagtacaatatggaatgtgtgaaagagtggctacaacggcagacccccatttccgaaatgcgagaattttgaacgggatggcggtgtccgcaccgccaatacttaaaaccctaaaaacaaaagatatgatagccaagacgatattacagcagataggcggaaaacgcttcaccgccatgacaggtagccgtgatttcatagatatgggcaacggcttacggatgagccttgcaaggaacaaaacaagtgccaaccgccttgacatcatctatgacgaaggggcagacctctacaatatgcgcttctaccgcaggacgttcagcaaaaagacctttgagtgcaagacaaaggacattgccgtacacgagggtatctattttgatatgctggaggaaatgttcacgatggtgacgggactttacacacgcttttgagtggcggggcggcgagagccgccctactttctttcagtgagcatgatggcggacaaagaaagtagcaaagaaacctttgtccaatctgcgataactaaaaaatccgcaagtaaaacttgcggaggctatatattgggtcgttattttttggtggaggggaatgataatctcgaaccgttgaactacacatttctgcttcgtctccatttcccccaacgatttgatacgttcaatcatttttgttgttcctttctgaattttcctaaatactttcttcataatttcgctatactttttatggttaataactatgttttgtattgctctcacaacacttacaacttgaagtgttatttggaaaccgataggcaaaaatggctcaacgatgtcaattaacgagaaaatcctacgataatctatcaagtgatagagcaaaagacgtgccaagttaaatatggcacgtcttttgccagttttgtcagtccttttatgggatatacaacagcgcaaactccgcctttctccgtttgagcagcatggcgtggcgttttcctttgtagttgcagaaggctatatactcacggtagatgttcctgtcaccagcttccagcttcttgattaaggtgcttttggggattgttttgctgcctaacagcttcgccggtcccacattgtaagctaacgtgccaagcaaaatcgaatcaaccccgaatttacggaacatggcgacaaatttgcgcaggtctttccgcaaaagttcatccgcatcccgttttgtcatggttcgtgccgaatacttctcgtttggcaaaagtttgtgaccccaaccgacgtatgggtagtgtttttctgagtgccagccttcaaagtagcggcagcataaaaaagcacgttccataagcggcagtcggtagattgccgcctgcccgtccgttccctcttggcggctgatctgcgcggacacagaacagaccgtcagaagtgaacagagcattgtcatgaatacacgcatcatttcaacaaggggctgaagttgccgatgggaacgatggtaagatcgtcgtcctttacattcctgttgttgaagtcaaattccagttcgtaggagttgctaaagttatcctccaccaccacgatgaaattatgcgcctcatcacccgccgccgtgtagtacaggcggaatttttcgttctccagcaggtagcggtcgttaggcaggaaggtgatgccgttatccattttgagcgagccttccccctcgaactggaaatagcggatggtatagagcgtacccgaaaagtcgccctcctttttcagttcacagcggatttccactgtctgcccctttactaccttgttcggcacgggcatgacctccaccgtgaagggataggactgctggatgtccatgtcatcgtcacatgacacgagggtgaatgacatggcggctatcaggcataacgccactgccttgaatattgatgttctcttgtttctgttgttcagtatgttcattgttcttcgatttttagatggttgtttttctgttttttcgttgtcagttgcaggtactcgttcaagtccttgcaaccgtcatagagggaggaacggtcggtgacacgttccccgtatcgcatggtaagtgcggcaagcgtccgccgtccggcttcgtcacggtcgaggaagcagccgatgcgcccgtatccgtccagcaatcccgccgccttctccacgttggcgactgagttcagcacaagacagtcagcgttaccggttacaccaagcgtcacggcagagagaaagtccatgaagccctcgaacacgaggcactcgtcagccgggatgtcattcgcctttaccagtgatacagacttcggaggtatgcaacccttgaaatatcggcttctgacttcatagccacctgccatgttcggaaagccaacggcaaaataccgtttcccacgcacaccgtagttcaagcggcagcagtgacgggatgcgatggcgtaagggatgccccgttcctctaaatactccgtcagcagtgagcggagcagcggagcgacctccacatcctcaaaaacggattcggtcggcttcgagagatagacgggcttttcccatccggcaaccgtcatattggcggcttccgctatgaacttcgcttgcttcatgaagtcatcgctttgcagaaactccccggcaagcgtgaagatgtcgccgcccttgcccaaaccgaagtcgtaccagagctgtttcgccacgttcacacggaaagaggatgtgcgctcgcccctgtacggggcaagataccacagctcgttaccgctccttctgacaggctcatgccccagccgtgcgagaaaatccgcaagcggcatccttctgacagcatctatttccgtcctttccatgcccgtgtcagttgatgatgaacttgataccgaccccgaactgcgtgtggaacttccgtgtgtcgccaccccaaaggcaacgctcccgcaggttggcaagcagggcgatacggtctgccacgtaacactccacatcgagcgtcagcgcaccgccgtagatgaaggcgtcccggtcgtgcagcgtggagccgtcatgcagcaccttcttcccccaatttaccgcctcatatccggcgagagccgaagccccggcatagacgaaaacaatctttcgggcgtccgacagtatcttgaagtaatagccgccctccgccgtgaactgcgccacgggtatcttggtgtccttgtagggattgttcttcaacaggtattcgccaccgaacacccacttgttccccttcttcgtgtaggtggagagagccgccccgaagctgtacccgccgtccttgccgccgagattgaagccgtccgccatgtccgccctcacctcgatgccctgcatcttcggcagacaccgctgggcgtgcgcctgccctgtaaaaagggcaagcgacgcgatgattattgcgatgtactttctcatggtcagcgtacttgaagttcgttgatggtacccgcgcgtaccaaatcctcgttctcaatcacgaaggactggtgacggccgccgttcttctcgttcaattccaccacgaggcacttgtcatcggggatggtgaacttcgccatcgtgaagaccgtgcgctcgctctttttgcccggcacgagggtggcgtagttctgcgcgcggagcggcagaataatctgctcctgcacggcagtacgcttcgcaaccttcttgtccacgattttccaagtgatgtagtccacatcgaaaggcacgttgctctggttctttatctccgtgtggaaataaagcaagccgttgtgcgtgtagatgcctttcaacaggtattggatgccgaaacgcttgcagccgatatgcttcacctcgcgcttgttctgtttgtggatggacttcatgataaggcgcaccagcatcgggctttcgctgcccagctctttcagatagatttcctgcgcgttgttcgggcggttcaccgtgctgccgtcatggatgaagtcgcacatctccacgttgagcaacagcggttcggcggcgtacttcacgttgaaggtgtagaaactgccgtcctccgtgatgacggacatattcgtttcgttgggaaaattccttacggtagccttcacacggatgatgttctccgctccgtcggctttcccggcaatcaggtcgggcgagcctaaatcgacatagcgcacctccgccggaaaaatgacgtggacggtcttgtcgtaggtcacttccagaccgtgcggcggtatcatgcggtcgaaggtcagcttgcgtgacagcccgtgatataggtcgccgtccgcctccttctgcggatagacctccttcgtcaaggtcggttgttcacttccgttggtcgtttcaacggttacattctcctgcgcgttggcagttatgatgcccatagcgagggcaaacatgatgattacttttctcattacttttggattttagtggtaatttttattgttttcaatatttttcttggtaaagcatgaccctgtacccggctttcagatgcaccttgacggttcgcatctttttggcgatgtactggctcgtgccttgtatcagccccttgcccaagtcggaggcgagctgcgccccggcattggtggagatgttgatgctgcttcccagcgagccgcccatgttggcggcgacctcccggacggcgttcatctccatcgagttcgggatgaagatgccgggctgtccgtccgtgtcatagaccgcaagctccacggggataatcgtgccgtcgtattccagcgaggtaatctcgatgtcgagccgctcaccctgtatcttgcccgtgccgaccaccaccgcaccccggggtattgtcctgcctgccaccgccataggctccagcaggcgcagccttaccgtctgcccgtccgtcacgctctgcgccccatgcacgcacgccggtatggtgttcctgtccaatacctccgccgtgccgacagccgtgttgaaaccccggttgcgttcctgcgataaggcggcgacaaactccgcgttactcataggctgtgagagtgaagaaactacttgatgctccacctgtctgataggcattgccttgttcttcttccctttctgcacggtagttggctctgccctctgttccgccgatggctgtcctccgttctgaccgcccatgtactttgccgccagctcgtaggacttctccataagagccacctgctcgtccatagaggaagccttgcccctctcgctttccagttccgactccagcgatgcgatgcgctccaacaattcgtccatctccgcattgtcgtttttcggctggtcgtagaagtttccgagcgtggcgttcaggtcacggtaggcggctgcggaggactggatggtctgcggcgtggctggctttgccctttcttccttgccgcccggattggcgaggtcgaagtccactccgttctccgttcccgctatctcgcggtcgaacatgtcgcccagctgcccgatggcacggttgcggctctcctgacgctcttccatctccccatgctcgtaggctttcagcttgtcgccgataatctgccggttcgccttgtcagcgtcgggcatctcggtgttgtatccgtccgttcccggcggttgctccttgccggaggacggggcgaatatcagccacatcgccccgatgaacaccaacaccatagcgggcagcacgatcatcttctgccgtttcagccgttgcgcctctgtcagcggttcgcgctcctttttcggtttccccgtttcgggagcagctttgttctctttcgtcggttcattctttgtctgttccatataaataaggtgttaagtgattgcctgtttccgccggggtcggcagttccacccgtccggcgtgtcccgtttccatatgtgagccgtcgttcctgccgatgtcatagacggctctgccgaaggtgtaaagggcaagcaccgcgaaggcggcgaacatccccagcacgatgcggcggcgtgtttccggcggcaagccgtccagataccctttgagacttgccgccaagcgtttccgtttgtcgtggagtttccaatacatgccccacattgattttctgatacttttcatgtcctgttaccgtttgatagtctgtaaatccttgttctcaatgatggtgaaaccctcgatggtaaaaccgttcgggttgtcatccgaccgcgatgcgttcagcaggcggcaggtggtcacgaggctgcgctcggtgacgttgctctgccggatgattttctgtgtggcgtaggtcacggcacggtagggataggcgttgaagtcgcacaccacgctgtccaccttcagcacttggttgatgttcccggcgatgatgcggttgtagtaccccttctccgcgaagtccgaataatagtggtacacgctcttgtccgccagcagcaaggcacgtttcacgttgtgttcaatcgcgcttttttcaggtgatagcgtgaagaacatctcgtggaaacggcgcacatgttcccgtgcctccgccgggcggttctgcgacaaatcctgagacaaggcgagcatcaggctcttgccgttgtccagcacatagattttctcccgttgcttctctgcgaaacggtaggagttccacacgctccacaccgtcaccacggcgcacagcgagaggaagacgataccgaacaggcgtatctgcctgaacgacgattcgatgtttctaagtgatttgaattccatttatattttccaatttatgattgcacattgattatttcagcaatttgccgacacgtccgactgcgtttcctgcggctgcacccgccacgctgcccgccatgcttccggctcgtcccgccatctggttcacgttgcgaccgtaaccgcccatgcctccggcttggataatccagcccgcaacggtgggaatggtaaagtagccgatgatgccgatgcagaggaatacgatatacaccccgtcgctcgaatccagcgagaagttcgggtctgcctgcatccgctcgatgtcgttttgcagcatcagaacctgtatcttcgccagtatggtgctgaacatgtccgataccggtagccacagatagacctgtatatagcggcatatccactgcgtgagcgtgttttggaaaccgtcccataccgacagggcgaaggctatcggaccgagaatcgccagcaccacgagaaagaaggtgcggacggtgtctatcacgagggcggcggcttggaacagcagttcgagtatctcgcggaagaagtcgcggatgctcttcttcatgttgtacattccccggtcgatatacattcccgccatcgtcaccatgtcggagggcgaccagccgagttcctccagttgcttgtcaaattcctcgttggacacgaggtaggcggtttcggggttgcgtaccatcgcctcgtattccagtttgtccttctgctcccggtatcggttcatgtccagcgtttccgcctccagcatctttgccgtgccctgtacgacgggtgagaggatgctgtttatcgtgcccagcaccacagtcgggaagaacatgatgcacagaccgatggcaaaaggacggagcatcgggaatacgtctatcggttcagctctcgccagcgactgccatacccggtaggcgacgtagaacagcgcacccagcccggcgatgcctttcgccacaccagccatgtccccacacagcggcatcatctgctcataaagtgaacgtaaaatctgatgaaggttgtcgaacttcataggctaccagtatctttcgttcatgttcccgtacagccccatgatgcggtcgaggtcgttcttctttttcgcacgcaggtaactcacggagatgttcttgttcgtgtagtagctcacgaggttgcggtaacgcttcatcttcgagtggcagcgttccaccacgtccatgcgctccttgtcggtcatggagagcgtggtgatgttcaccacgttcctgagttccgtcaacacttcgttgctttcctccagcagtttcgtgtagccgaaagcgattgcggaaagctcttcgggtctgaaattcccgtcacggagcatccgttggaaactgttcacatagatgtctgtgatgtcgcccaccatcaggatggtctgctgcaccttgcgggcgtccttgaccagattgttcaccgatttgagggcatcgtaatacttcttgccctgctgatagattttcaccgtctcctgaaagttgctcaccatgttcgtggcggtcttggaggtatggatgatgtttttggaggcattgatgatgccctgcgctagattgcccggatcgcttacgacccactgtgcgcttgccctgcccgcgaaaagcaggcacaggcagataatcattgttattcttgttctcatgttactttggattttagtggttgttattcttcggtcggatgtcccggctgcggcttcacccgcacatagtccccgtttggcgagaaagtcagcacatccgtggcctcgttgtaggacacgtcgatgcggaagccggtgttcatgaacaggttgccgttctcctcctgcaagagataggtttccggcttgagcttgcggcgcagaccgctacgacggaacaccgtcactttgtaggcttcgccctccttgtagataagcacgtcaggttttccctccacgctctcccagttcccgcacagcatgtcgcggcggttgtcggccacgtcgcaggattgcagcatcatgaccgccaatccgataaggcacttgctgacttgcagcattttcacttttggtaaattcatacgcgtttttcttttttggttgatacattctgttttttagttattccttgtttctccgcctttcggcaagctgccggatggcggcttcgatgtcgtcgcccagcttctccgccagacggtaaacctccactttttccgtttcctcggtggtgtacgccagatactcttccgcgctgacctccgtggcatagaccgccgactgcgtgccgcccaagcctatccacacctccttgtagagccgtgaagggttgttcgccatgttgatggagagtatctgcgacttctccttttccgtcagtccgagcaacgcctgtatctggtcgaacttgttcatatatttcctttggtcaagcaggattttacaatccgagttgttgataatgctctctttgaccaccggagaactgataatgtcgtccacctcctgcgtcaccacgattgcctcgccgtaatattttctgaccgtcttatacatatagcgcagatattcagccatgttcgccgatgagagggccttccaagcctcttccacgataagctgtttccgcacgcctttcagccgccgcatcttgttgatgaaggcttccatgatgatgatggtcacgacggggaacagttcgcggttttctttaatcgaatctatctcgaagacgatgaaccgcttgccgagcaggtcgatgttctccgtggagttgagcaggaaatcgtaacgcccgccccggtaatactgccgcatggtggtgagcatgttgtcgatgttgaagtcggacttctccaccttgatgtcacgctgtgccagttccttgcggtagtcgtcacgcatatactcgtagaaggtgttgaacgacggcacgatgctacggtcggattggatgcgctcaatataggcactcacggcactgcccagctcgccgctctccgtctttgtcaccttgtcgtcctccgacttccagagcgtcagcaacagggtcttgatgctgtccttcttctccacgtcgaagatgtaatcgtcggtgtagaacgggttgaagctgatgggcttatcttccgtgtaggtgaaatacacaccgtccgctccgcctgtcttgcgtcggatcatgccgcacaagccctgataggagtttcccgtgtccaccaataccacatgtgcgccttgctcataatattggcgcacgaggtggttcatgaagaaagacttgccgctgcccgaaggacccagcacgaacttgttgcggttggtcgtgatacctcgcttcatgggcaggtcggagatgtcaaggtgcagcggttttcccgtgagcctgtccaccatcttgatgccgaagggcgagagcgagctgcggtagttggtttcctctgtgaacaggcacaccgcctgttcgatgaaggtgtggaaactctcttccgccgggaagtccgccgcattgccgggtatcgccgcccagtagagtgtcgggcagtcgatggtgttgtggcgcggcacgcattccatgcttgccaactggctgcccacgtcgttcttgatatgcttcagttcctccgcatcgtcgctccacgccatgacgttgaagtgtgcccgtaccgaggtcagtccgtaggaatgggcttcgttcaggtattggtctatccactcgcggttgatgctgttgctccttgaatagcgagatagcgactgcatgttacgggcggacttctcgaacttctgcaaggtttcctcactgttgtctatcagcacatactggttgtagatatggttgcaggagagcagaagccccaccggggaggcgaatgacagtcggcagtcactccggtcggtggagagcttctcgtaacgggtgtcggtagccaccttgcccggcaggtcttccgcgtcggagagggtgtgcagacacaggcggttgtcgccgatgcgcatctcccttgccgaaagctcgatgtcctgcaaggtggtgtcaccttccggcatgagcgagaagtagcgttcaataagtcccgtctttccctcagtacccacaatctcatcggtggagaggcggcgcagcctgacaagcccgctgtcgttcatgatgcgctcgaactgttcgcaggcttccaagaacttggtcgtggtttccctgtccagctccttcgggatgatatgtccccggcacagcgtgctgaaattgctctgcatccggttacgctcctttgttgtcttggtcaggtagaggtagcaggtgtgtttcaggtacggacgctcgttgaagtgacgctcgaaagagcggcttaaaaagctcatgtcgtccttctgaagctccggtttgtagcgttccttgatgaaccagtcctgtttgtggacgacggagtagtccggcagcaccttgatagccttgcaccagcaactgtgtatcgcctcgtactccgcacccgtcacggtgtaaagttccggtagttccacctcgaaagccaccgtgatgtcggcgtcctttgagatgatgcagccatgctccaccgctaaaagtgggaacctgttttccagtgttgtcattttcgatgtattcctcattgtctttcttcctttcgttgtcgtttgaacagacgggttatccgccgccggttgataaggtatcggggatggctccgtgccgctcctaatttcatcagcccgtgttcaccgtaccgggcgttcagcgcgaaggtctgccatacaaggagggaggacgatgccgcgccgaagccgatacatatccactggtcgataccgaccatgtagaggatgacgaacaggacgaagagagccagcagacctccgcagaagatgaagaggtactgtgccttcaagcgtaggctaagagcccagcgccttgccgtatttctacggtaggtttccgagaactcgcctccgaaccgtgcgtacacctctcagcgtacacggctctccactaacatattcagtctatcttaccggcatgtattttgttgtgacagggaatacatactaccatagtctttctctgacgtccaatcatttggatttcccaaggctttttgccttgcaggtctttaagacgcttgacatggtgtatttcgatattaccctcagcaccacacaattcacactttccggcttgcagcctttgtataaggcttgaaacagtggtattgaaaattgtgttggctacattatcacaactcgcttccatagcggtcgttttgcgcttgaagctaccattgaagaacacccgcatcttctttctacctttcttgtcctcatagaaaactgcaaaatccttgttgaatcggtatttcgcaatgattttgcggactgtggtgctgtactttcgtgcaaaagtcttatacatactgtattgcatgatgtacttgaaagaatttaagtgcgaactgttgttggcgattgaaaaatagtttgcaaatcctcggatttccctattgtaagcgtccagtatttcgaggtcgtccagatgtaacattttcgtccgacttgtgggtttccacttcgctttaccttcgaattgatatattttcatcgcttcgtagtaaagaagtttatcccgcatcgtggacattggtacttctaatacaacctttttaccgtaagccttgataagaactcccgatttcttgcccctcaatgtcttatccgtgaacggtcggacatagatttcatagccgaggaatttagccttttgatttccgtgtgtgattaaggtcttttcttcggacagcgttaatttcagtttttcgctgaggaagtttttaatgtcctctttgatagctacgcaatccgctttgctcccaatcactccgataataaaatcatcggcatacctcacatacttaatccgtctatatccctcatccatttcatcgacagagggcaagtgcatcctatttttctgatgttgcttaattgcatcaatcagttctttccgagtttctctatcctcggtttgcttcagctttgtgccgagccaccaaatctttccggaatagcttttgtactcaaggttcattccccgtctttcacctttatcgaatttatcagcgtattctttcatatacttgtccagcttgtcaaggtaaatattagccagtatcgggctaatgatgccaccttgcggtgttccgctgtacgttctgtgaaacgcccaatcttcgatatagcctgcttttagaaacttccatatcagccggataaagcggtcgtctgcgatgcgttctttcaggattccgataagcacatcatggttgatgttatcaaaaaatccttcaatgtcgccctcgataaaccacttagccgcagtaaaattcttctgcacctgtattagtgcggtatggcaactgcgttttggtcggaagccatgcgaggtgttttcaaaacttccttcgtaaattgctcccataatcattcgcagtacctcttgcactaatttatcgtcgaatgacggtatgccgagaggtcgcattttcccgtttttcttcgggatatatgttcttctcgctggtttcggttggtacgattcatttttaagcgcaccaatcaaattttcaatccgttttagactcattccgtcgattgttttaccgtcggaaccctccgtcatattcccttgcttaccttgtatattatgataggcaagtagaaacatatccgaattgaatagaaccctgtagagccgttcaaacttatagtccgaaactttgctgtgctctgacagactgtttaatactttctctggacttctcataatgtctcacacattttccattaatttgtattaaaaaatgttagctgccacccttcgccatgtacgaggctttccctcgctcggactactacggtggctccgttaccataccggattttcataggtctgaaacctaatagcctttcggcattccgggttaggtaatccacgtttagctctttggcaacgtagcttgatagattgtcggatacgactttcgttcgtttctgcttattgcagttgtgctgtaacctgttctgcacccaatcctcaaaggtcgaatcgagtgtgttacagtatggcgtttgtagttaccttccgccatagttccgagttgtaccacttggactatcgttcaatcaatccagactttatcctcatatctatctttcatctcctgattcagtcgcatatctggcaactatatgacttatcagtttatcggcaggctatactccccgtctggtttccctttcggataagccgattgatgataggctatcgaacacttgcctaacgtcttgctattgacgtatttgccaatgaaccattacgtgcgcgcccttgaactctaccggacggccgatacccttgttgattgggtattcagccatacattatttattaaaggaagaatgagcgcaggatggtggcggcaacaatcaggaagatgcacgcgccgaaccacgaggcggctgtcttgctggtgtcggggtcgcccgatgaaaacttgccgtacacttttacgcccccgataagcccgacgactgcaccgatggcgtatatcagtttagttccggggtcgaaataagaactcaccatagaggtggcttcgttgatgcccgcgatgccgtttccctgcgcgaaagcggaggcggttgcggcgatgacaagtgccgcggagaggattgcttttctgtttttcaagatgttcttgttcataaactgttcttgttttttgccgtcaaaagggtggatggtcctttgtcgggcggttgatactttgtttctttactttggttttagtggatgcccgtttgtttccacggacgtgggcgtgtccgttgcggatggggatgcgccttgcgtttcctcgccgcgtgggttgatgtcattctttcatgttcatttcttttattgttgtcatacatagttgcgaatgtcgaactcctcgatgttgtccggcacgacgaactccttttcagatttcttcagccgaatctcgataagccccttgatgcggatgcctatctccgaagagccttccatcattttctcgtacaactccgtgccctccatgtcggtgaacaccttagccgccttttcacgttccgcctgtgtcgcgtccgggtttttggcggtcttgcaggcgtcgtcaatctcgtcaaagctgctgcccgaagcccgtggcgtgtccgaggcgtcctcttccggttcgtcgtccccgtatcccagttcctccggcggtatgctcgtgaaggtctcatcgagtttttcctccgggacttgtgccgggcgggatgcgtttcccgtttttccgtcgtcaaaagtagcctcttcctccgacagctcaatgcctttttcaatagtggcggcttcttgcgtcggtatggcagcggttgtccgggtggatgccatcctgaaacggctcttgccgatgatgtccgccttttccgcagggacttcctcgtgtgccgctatgcgtttagcctcattcccgtccagtgaccgccataatccgacaatgcccttgaagaagcggacaatccgcgtgtccatgatgcgctcgtaaaggagcaggaacaggaaccagaggttgcagccgaccgataccgccagcagaatgtctgtcatgctgattgtgtaattcatatccttccgtttttggttagaatactgaattgtaatttcgggcataaaggctctttatcgcatcttcgcactggttgaagtggtgcgtcagcacatggtcgatgtaagcggacagcgtaagccggtcatgcccgattacacgggtgatacgcatgatacgctcgtggtactccgggcgcacatacgccatcttcccctcacgtgcctttacttccgggtcgcggatgaacaggcgttcatagtccttctcactgcatttgccgcttaccgggacaggcgacagtatttccacactcgcctgcacttgggtaaacatacctccgcagtcttgctgtggtcttttttcattcggtgtcatttctttttccattttcaaatcagatcttcacgttgtttcttgtacagttcgttgattctctccttgtgctgttccagatgctggcgcagcacggtatccacatatccgcctactgagatttcccctccggcgatgtcgttcacgattctgaggatcttgccgtggacgtcacggctgatatagacacattggcgggtctttatctcgttgcggcgcaggaatagctcgttgtagtcctcgtcctgccttttccggcgtccactttccctctgcgctttttcccgtgttacgggttgcacaggagatggttccggtgcggcggtgtcctcttcggtcggtgcagctgcgggtacttcctgtgcggggcgcagtgtcccgtcctgtgtgcgccgcccgatggaggctaacagcagttcctcgtcgatgccttccgtgttcactttcctgctgcccatgctcactgcggtctgatgatgtcgcttatctcttcggaaaactcccggatgccactccctttcagcagtgccgtgtccatcgggaagatggtggagcggaaaacgctcttgcgctcttccgaaaggtcacggcggaacttcttgctgtcgggcaagcgggtggaaagtaccggaaagcccatttcggctatcacttcctcgtagatgccgtacaagtcgttcctctccctgccgtccaccatcgtccagaacagatgcagcccctttgttttcgcctgtccggtagtcatcagcctgtcgcggaacatcgtgacgaatttcagggtactctccacgacaaagcggtcggcactcagcggagtgaaaatgtagtccatctgcgagagcgtctttatcacgccgttgcttcggagtgtgccgggcatgtcgaagaacaccacgtcgggtttcacgtcctcagtggcaatcatcctctcggcatcgtcgagggcgttcaccgcattgcttttgacgatggtgtaggcgttctttttgatccggcggaaatggtcgcaagcgagagccttgaagtaggtgctgctgtcgataagccccatttcgtgttcgcgcagcccgtggatgctgtgctgcgggtcgtcgcagtccacgacggcgacattgtagcctttcacgttgtgcaggtagctggcggcaagtgccgtgacagtggatttgccgatgccacctttctgtgttgcgaatgcaacgaagatttccttactcatagttccatttattttaattgttgatgatttgtttttctgtttccatacggatttggctgtcgcaccatccgcttccgtgactacacacgcaggcgggtcgtcgcgtatccggttctgtggtgaagcggtgcgtcggacaaatggtgattgacgacattgcgtcatgaagtcattgaatccatacgtcaccgaattgtcggagaaccgggtttccgacggttcgggtatccgtttcggcaagtatccgaagaagcggatttccgggtatttgaatgttccgtttatcatatcttcaaatcgttcgtttcttgaatcatgctgcaaataaacaagtatattttggaacctgtatcacttctccggcaagtggcggcacgttgcgccggttggcagtcattgaccgggtcaagcatctgtccgataccgctttaagggcgtaactttgcacccggacagcagggttcgccgatgacgcgcggcccggagtcctgaaaggtattttcccaatccgtcccctgacggatttttatgttcacctgaacatagcaagatgtcttttcagccgctcaaaatattttgagcagccacgaaaagcacttgcccttgcagggggcgggctttccctccgaagtcgggaagcctttcagaactgcggtgctgtaatccgaagcggcggcttatgccgtcaatccgctaaatccaaagtaatatgaaagagaaaaggaaaagcaaatcagggagaaatcccaaacttgatccggcggtgtaccggtacaccgtccgtttcaacgaggaggaacacaaccgtttcctcgccatgttcggaaaatcgggtgtctatgcacggtctgttttcctcaaagcgcacttcttcgggcaaccgttcaaggtgctgaaggtggacaagacgttggtggactattacaccaaactgtcggattttcatgcacaattccgtgccgtgggtacgaattacaaccaagtcgtgaaggaactgaggctgcatttttcagagaaaaaggcgatggcgttgctctacaaattagagcaacacaccgtcgaactcgtgaaactgagccgccggattgtggaactttcaagggaaatggaggcaaaatggtcgcaaaaatcagtgtaggaagttcgttgtacggcgcgattgcctacaacggggagaagattaacgaggcgcaggggcggcttctcaccaccaaccgcatctacaatgacggttcgggaacggtggacataggcaaggcgatggagggttttctcaccttcctgccaccgcagatgaagatcgagaagccggtggtgcatatctctctcaacccgcacccggaggatgtgctgaccgatattgagttgcagaatatcgcccgcgagtatctggaaaaactcggtttcggaaaccagccttatcttgtattcaagcacgaggacatcgaccgccaccacctgcacatcgtgacggtcaacgtggacgagaacgggaaaaggctcaaccgggattttctctaccgccgcagcgaccgtatccgcagggaactggaacagaagtacggattgcatccggcagaacgtaaaaatcagagattggataatccgttgcgcaaggtggccgcatcggcaggtgatgtgaagaagcaggtaggcaacaccgtgaaggctctgaatgggcagtaccgtttccagacgatgggcgaataccgtgcgctcctttccttatataatatgacggtggaggaagcgaggggcaacgtgcgcggacgggagtatcacgggctggtctattccgtcacggacgacaagggtaacaaggtgggcaacccgttcaaatcctcgcttttcgggaagtccgcaggctatgaagccgtacagaagaagtttgtccgttccaaatcggaaatcaaggataggaaactggcagacatgacgaaacgcaccgtcctttccgtgctgcaaggcacttatgacaaggacaaatttgtatcccaactcaaagagaagggcatcgacaccgtactgcgctacacagaggaagggcgcatctatggggctaccttcatcgaccaccgcacgggatgcgtgctgaacggttcgcgcatgggtaaggagctttcggcgaatgccttgcaggaacacttcaccctgccatacgccggacaaccgccgataccgctatccatccctgtggatgctgcggacaaggcacacgggcagaccgcctacgacagtgaagatatatcgggcggtatgggcttgctcactcccgaaggtccggcggtagatgccgaggaagaggctttcatccgggcgatgaagcgcaaaaagaagaaaaaacgcaagggcttgggtatgtaatcagagtatcaacaattaaaaaatcaatgtatgtcacaacaagaagacgatttgagggcattggcgaaaatcatggattttctgcgtgccgtgagtatcattttagtggtcatgaacgtgtactggttctgctacgaagccatccggctgtggggcgtgaacatcggcgtggtggacaaaatccttctgaacttcgaccgcacggcggggctgttccattccattctctacacgaagctgttttccgtccttttgcttgccttgtcctgtctgggtacgaagggtgtcaagggtgagaaaatcacttgggggagaatctggacagcatttgccgtcgggttcgtgctgtttttcctgaactggtggttgctgcccctgccgctgccgcttgaagcggtgacgggactgtatgtccttaccattggaacgggctatgtctgcctgttgatgggtggtctgtggatgagccgcctgttgaaacacaatttgatggaggatgttttcaacaacgagaacgagagtttcatgcaggaaacgaggcttatcgaaagcgagtattcggtcaatctgccgacacgtttctattacaggaaacgctggaacaacggttggatcaatgtagttaatcccttccgtgcgtccatcgtgttgggtacgccgggcagcggcaagtcctatgccgtggtaaacaattttatcaagcaacagattgaaaagggctttagtcaatacatctacgatttcaagtatcccgacctatctactattgcctacaaccatttgctgaaccacccggacggctacaaggtaaagccgaagttctatgtgatcaacttcgacgacccgcgacgctctcatcggtgcaatcccattcacccggattttatggaagatattacggatgcctatgagagtgcctacacaataatgctcaacctcaataaaacgtgggtgtgacctgtaaagtcacgtaattgattgttagacagtgatattaattgcatgatttaacccgctgttccgtcagcggtagcctactataaggtgcatctccagtgatgggttgtgccaagcttataggacaaagtacactttccgaaaggacaagactgaaccgtgagggaatgtcaaggacggttagtatcataccgttgagtggcgaggctggatagcatggttaacgtaagtgaactgactttagccgtcgtaaggtttgaaggagcgcaagatactttagctctcaccaaaaggtaagcagtcggataacccttgcccatgttggggttacacggacacagcactgccggcggacttggcagaacctaaactatccgtttgtcaattacgtggaacagggcaagcctgtatctctctcgtaagaatgcgagtaagcgaaccgcaaggcaagccgaatggggtgcaggtatgagataacggaaaaagcgaatgccaccctgtaatggggtggatacggattgaatcaacatcacgagttgttattggtgacatcatccgacacgaaagtgggcagacttccgtatatggtaactctttacaagataacttttagaactttcaaaaggaggaaagcaaatgaacgaaactaaaacatcgtgtgcgcctgctgatagtaggaatctaacttgggacggcatggactggtccaagtgtgaagcctatgtccgaaagctacaagcgcgtattgtaaaggctcaaaaggaaggcagacataacaaggtgaaagccttgcagtggatgctgacccactctttttacgccaaggcattggcggtaaagagggttacttccaacaaagggaagaaaacgtctggagtagataaacagctttgggattctcccaagcgcaagtacaaagcaatcggtgaactgaaacgtcgtggttacaatccgcagccgcttcgtagggttcacatcaagaaaaagaacggtaaactccgaccgttgggaataccgacaatgaaagacagggcgatgcaggcattatatctcatggcattggaaccgatagccgaaacgacaggcgaccgcttttcttatggtttccgcaagaaacgcaggacaatggacgctatccgtcagattgatacggttctaaaccgccagcattcccccgaatggattttggagggagacattaaaggctgcttcgaccatatcagccacgactggcttcttaatcatatccctatggataagacgatactcagaaaatggctgaaatgtggagctgtattcaatggcaaactattcccgacagaagagggtacaccacaaggaggtatcatatcaccgacacttgcaaatatagcacttgacggacttcaaccactcttggctgaaagattcaaaagattatggcgcaacaataagacattccactacaaggtaaaccttattcgttatgcggatgactttataatcacaggtcgagataaggagctattggaaaacgaagtcaaacctatcgtgatagaatttctcaaagaaagagggctgaccttatccgaagagaaaactaccattacgaacatatacgacggttttgatttcttaggtttcaatgtgaggaagtttggcaaaaggctatacacatccccgtccaaagatgcacagaaacgcttcagggcaaaaatcggtgacatcgttaaaggacataaaatgtgtaagcaggaatcgctgatacgaatgcttaatcctgtaatcacaggttggggcaactattaccgatatggtgcatcaaccgatgcttttcatggttgtgacaatcacatttacaatctcacgaagaaatgggctttacgtcgccatccaaagaaacgcaagtcttgggttgcagacaaatattggcatgaaattcgggggcgtaaatggacgtttgcatggaaatatgaaaccaagagcaagaaagtgaactacctgacccttaaaaggttgtcggatatacattataccccgtacaagcaaatcaaaggtgaggcaaaccctttcgacccggaatacgatgattatttctttcagcgaaaggagcaacaaatgctggaatctctcaagggacgtaagtctctcttatatttatggaacaagcagaaccggatttgtccgttatgcggcaaggaaatagattgtacaaaagcatggaacgtcaacgaaatatctgttggtggttcgattgtacggcaacttgtccacaacaactgctacaagcgaaataaacgaaaatgttgaaagtatgagccgatttctaacaacaaatagaaatattgagttgcttgagccgtatgaggggaaactctcatgtacggttcttaggggagaagggggcagcaatgcccttgacttacccgatgtgcaaaagcagggcgacttcttcgtggagtcacctatcattctgtttgccagtattatctggtatctcaaaatctatcagaacgggaagttttgcacgtttccccatgctatcgagtttctgaaccgccgttacgaggatatatttccgatactgacctcttatccggagctggagaactacctttcgccgttcatggatgcgtggcttggaggggctgcggagcagctcatgggtcagatagcgtcggcaaaaatcccgctttcgaggatgatttcaccgcagctctactgggtgatgtcagacagcgagtttacgctggacatcaacaatcccgaagagccgaaaatcctctgcgtgggtaacaatcccgaccgtcagaatatctacggtgcggcactcggtctgtataattcccgtatcgtgaagctcatcaacaagaaggggatgctgaagtcatcggtcatcatcgacgagttgcccacaatatacttcaaagggttggacaatcttatagctaccgcccgaagcaacaaggttgccgtgtgtctgggctttcaggatttcagccagttagtgcgtgactacggggacaaagagacgaaagtggtgatgaacactgtcggcaatattttctccggtcaggtggtgggggaaacagccaagacgctctccgagcggttcggtaaggtgttgcagaaacggcagtccatctccatcaaccggcaggatgtttccacctccatcaacacgcagatggacgcgctcattccaccgagtaagatttccgggcttacgcagggaatgtttgtcggttctgtatccgacaacttcaacgagcgtatcgagcagaagatttttcattgcgagattgtggtggatgccgaaaaggtgaaacgggaagaaagtgcctacaagaaaattcccgtcattacaaacttcacggacgaggacggcaacgaccgcatgaaggaaacggtgcaggcgaactaccggcgcatcaaggaagaggtgaagcagattgtgcaggaggaactggagcgtatcaaaaacgatccggtgctgtgtaaactgctaccagataatgagactgtctaacaagtccccaaaattgaaaattatccctatcgaagtttgaagtgacccccaaaagttggatacaatttttttggggggcacttcagttctgacgggtaaaatcgtaaaattcggacttgttagacaaatacttacgcggtttcaacctcaggtactgaatctatcgaattgacaaatttaaccaattgcggatctgaatctttttgtatgaggtttcggagactctttttcaattcataagcatcatcccctgctgtatttattaaatccatataaaaatctttgttttgcagaatcaatgaacggcatgccccatcggaaattacaggtttcactattttatcaataacgtctccagcttgacttttcaaattaccatgcgatctaagccatgtttcgaaaaattgaaactttattgcattgatagtctttttaccgatgcagaaatcatttcttatatcggtaactgtcgatttaatttttcgtttatccaatctttcaactatattcttgaaacaattagggaaaggattcaaactttgagttccagaagcaatatccatcagaatctttttgccaaattcagtcaagttatctggcaaggatttgattttagccagtaaatgttttattgcgacaaaccaataatatgatgtatgtgctgttctttgggcgtataatgtatcaacacttatttcagacaacgcttcgaacgctattttattgatatgatcggtcaggacattgcttattttagtggtcaaatcgtaaaaagatgcgtcaggaattacatctttaatattgttcttagtgatatacttatccaaatcggtattccactctgctaaatgctcgataaatacctcatccgttacacctattctgttcttaatatcttcaaattggggcaatatgtctgagagcaataatttatagccaagtttatgatttaccatgtattgtagtgtttcatttaatagcggtatattccatcccacactatttactaataagtctccatgatccacataatagtccatgagttctgcaacatattttatatctccaccctctattaaggaaacggaatgaccatgtgccaattgcatggcgactaaatcgtaatatccagactctttaatgtttcggccatcagtttctaattcagaatgcaactgatttatgtaggttgaatctaacgttacaggtaaaggtctttcttcgtcagatgccaataaacgataggttgtaaatatagcccctatattatctttatttacattctgttcatcaatgcaattcgtgatcgcttgcaaaagcgttggaaacgtataggtagaattatcttttaacgtttttacaatatctgcatggtcgaaattatcgggtagtaagtttgccaaataattatcgagcgcctccgaatttgttgctacttgataatatttatatgctttagttgtcgcgttatcccgataggcagcatctgttgcatttgcagcttgaatataatcgataaatgtatttggcttgactgtttttgcttcaatcaatgacgtaaaatcgcacgccaacttattttgcgcaataaacctgtctattgcatctaacgttttgaaatagtcgccgccattgaagtcattgaaccgaactatcttcttatataattgagcaatcacatggttttggctttccgtgtctaaatgcaacagcagttcttggtattcgacagggaacacctgcttctctatggattcttttaatttcaattgtgctattctttgccatacacgcagaataacatcgctctttcgagttaatttatgcaaacaatgtataatcttatcgataagcgcattgtccatacattgtataacttcttctaatacagtgtcaaattgtttattagtctctgcatattgatttatgtcgtggtcttcttctccgttgatgcagccttcaatatattttttcaatggaatttgtcgagcatcttcaacatcgacaccatataccaaagctgcaatttcgcgttgtgtttgcagatcattgttaattattgtttgaatgccattcagatagtcgccggacaatatttgttctactggatttgccagaatatccgtcttcttcaaacagaacaatgctatgtttatcatcaaaatttcgttacaccactcttgtttaagagcgaccatctcattgatatatgatataatttccctaacattggcattaggatttaccaatctgaatatccgatttatagtttctttcgcttcattttctgtttctccaaatgcttcaacaaacagtttgttgaatatacttcgatagtcggtaataacaggaggagcaacacgataaacaatagggaaagttttattgataaaatacttggtcagttgtttcgtttgttcgtcggtctcatctccgaatgcacaagctaaatgtgtttcatcgaaaggaataacagcccaaacattttcaaaaccgctatcggcgaagaacgtatggatagaagaccataattcttttactttttcagcggggagacgatccatgttgtcaaaaacaaggactaatttacgttgtcctttttccttgataaaatcagaaatgtcttgcatccatgttttgaactcgtaaaccgttggttcgtcttcgctcaaagtctcatagcaaacgtccttttcgactttatcttgataaatagctaacatataactccatccatatttatgatctttgctatatgcccatttccaaacgcacaatgcaataagaactggcagtgcagctatgataatagacaataaagaaaaccaccatgttgtgggtgtaggttttactgcatacgcaataaatgtaaatatcggagttaaaactgcaaccaaaaatgccgcaaccataccattactgataaggggatatttttcggttacggtctccgttttacgggctaataaatatttcagcttttcagaccatgatacggttttcgtacctccacctttgacttttattgttgcatttccagataggataccatcatcaataagtttgcttgtaagcaattccaatatagagcggcgttgcaagtcctcttgatgtccccatgcgtcatactcaaaaaagtaatagtcgtctgataattcacgttccaacattttaaccacgttggattttccagatccccaaataccttcgatgccgataattcgaggtaaagtacattcctcatccaatgaatcattctgacaaaaatggcgagcaatagtttttgccaacctttcttgcgaacctccatcgaatttgtcaataccacacggtttattttggataaaccgcggatattgctgtttggattgtagttttgtttccatatacgtaatttattgattatacgaactccaaataattctcccgatttaccacatgaaactcggcatagggataggcttcttggaaggctttcggtgcggccggcattttatttccccacttgaactccaaggcggtaagactgtcggcactctcctcaatcaggtcgatttcctgtttgtcgtaggtgcgccagaaatagaactccctgtgcagtccctcattgaagttcgctttgcgccgctctccgatgatgtagttctcccacagcgcaccgacatcctgccgaatggccagcggtgagaaagccccgataatggcattgcgaatgccgttgtcgtagaagtaccacttgccagcttttgtaacctccttgcgtaggttacgcgaataagcccccagacgatagataacgaagaccttttccaataggtcgaggtatttttcaacggtcgtcttgctcatgccgagttgtttacctaactcttcgtaagaaacttcgctgcccaactgaaaagctatcaatcgcagtagatcgcgcatcttgctcgaattttttaagccgtcaattgctaagatatctttaagcaggtatgcaccgacaatatcacgtaggtagtctgttttacgttcatagttctccatcattactacttcgggataggaaccgtaaatcaagcgcgcttcgaggttctggcgggtttcaagtgccgtttccgtctgtgcgatttcccgttgcgagaatggtgtaaggagaaattgcgtactgcggccgaccaacggttcaccagtcttattcagcaaatcgaatgacgaagaaccacttgccaagacacttattcccggtatttcatcaactatcaacttcagaatactaccgatttgtggtatgttctgtgcctcatcaatagccagcaaatcaataccatccaataaatgccgataattggctattgagcgattctccaatagtgctaatgtgtcgtagtcttcgccgttgagcatcatcgtcctacctgaatagttgtccacaattttacgcatcattaccgttttaccaacacggcgagcaccaaaaatcagtactgctttattgggcgcgattcgtgctgtaatcttctcttgaagtattctatttactgtttccataccttataaaatataatgcaaagataatcatatttttttaattggcgaattttacaaaaaaaacgggctattaaatggcgatttttacaaccacaatcttatggaagttgtttcattgtttttagtaatgatatatgttcatactatgatgactcaataatttaccagacatacgtttctgaaatttgtccttataggaatgaaaaactcacatatattgtgctaattaatatataattaaatgaaaataaaaagacaggatacgagtattcctgtcttctcatatgtaatggatatttttttattttctcatccgctccaactcctcatcacgcaacattctctcgttcagtttttcctgcatcctgtcaatgaaataggtgcggctttcgttcttccggcgtttgatatcagtgtagaagcggtagcagtctttagaatcaaccccgaatatcttatagagaagtggggcgagctgtttgagcggcatattgccgttgttgatgcagcccatcacgtctatgccgtagataagttccacgaggtcgatggcattgcccgtccattgaagaaggctggcggtggtttctgttgcgttgttggcggatattagtggtggcacttggggcgtggcaaggaatttctgcatctttcttacgaaagacagagccttgctgacgtaggcggcaatctctcttttttcttctgacagattacgtacgggatggtgctgcaactcgatttcgatgtaggcaagcgcgatgacggtaaggttcatgtccatgccgccgttgcacagttcgatcacttgggtggcgaaagccgtgtatgccgtttccatattgcagtcgccggcttcgtttatcaggcggaaaaagtcggtttccgccagcaagaaataattcatggttctgtcaattttgaaaattacactttgttttctgcgtgcgcacatgaatataattggcaaaaaacgcggcagaaaataaaaaatccaacactcaattttacaaagtgctggatttcagaggtataaaattcagtattttttcacaaggacaaattatctccgacttaaattgtttgtaatcggaacatttattctattcctgaaaatagaaatgtatgcttgccgcacattttggctatcttgcttttttatcaaggatatagataatgcgacatacaccgttgggatagcttttcaaagaggaaagcgtccagtgttgctctggcagagccgacttaaaaaaatgtcgtccgcttccggatatgaaaggaacggtgtatagtatgatttcatccacagcgtgcatccgcagcagtccgtttatatagtctgccgtgtccggtgtggcttccgcgaggtaacggatgtttgtgcagtcttttctccattcgtgcagcattgaaatggaatagtccggtgtcacacggtaaaaggctttcttcctgatttcatcaagaccgcaacggtcaaggcacaaatcctgatgtgctttatcatataactctgaagaaagacatccgtccatcgtcagtacggcgagaatctgaactttacccataatcgtttcctttcgttaggcaagggtaaaaaagtagcgtgcaattcacactaccttcaagcgatggctctggtaaagcctttacggagagtacgtgaatgcacgctatgcgtaagcatagcataagcatcacgcaatcgtctccgtagttccaatttaccagattttcgcttgaaacgccttgcggtcttatcctatatgttggcggcgaaaagctcctgccaatcgccgtttttctcaaatgttatgcaaagatagccaaattcagtgaattacgggctatgattgcttgaatttatatttaagtccatactcttcaagtttgctgtatagtgttgtcctgcctatgccgagcagttctgcggcgacactccggttgccgtttgcctgtttcaacgcacgcaatatccgctccttatcctccgcgtcattgcgcaaggcgaagctgacagtagaggtcggtttcgtcacggcaagttccagatgctctttcatgacaacaccttcctgcgcctgcaatacagcacccataactttctgccgaagttcccgcacgttgcccggccatgcgtgtgtcagcaacgctttacgtgcttcggaactgaacccgctcacgctacactccagctctctgtttgccatatcacggaagaactctgccagcggcataatgtcttcttgacagtcacgcaacggaggaacggttatcccgaagtcgtgcaggcggtacagaagatcctgccgaaaacgcttttcattcaccgatacctccaaatcttcattggtagcagcgatgatgcggacattgaaattccggtctgccttgtctccgaccgggcgataccgcctctcctgtatggcacggagcaacatctgttgggtttccaacgcgaggtttcctacctcgtccagaaacaacgtgccgccttccgcctcatggaaatatcctttcttggcattgtccgcacctgtaaatgcacctttgacgtgtccgaagaaagccgacggtgcaagctctttggagagtgaaccgcagtccaccgccacaaatggcttgcctgcacgtttgctcttgtcatgcaacaggtgggcaatatgctccttgcccgtgccgttctcaccaaatatcatcacgctcatatcggtggcggctaccagccttatgcggtgcatgattttctgaaaggcggaaccttcacgggcgaatataggcatacggcgttgtcctgcctgacgttctttcagtatggaacggatcagggggacaagtttatcctccacaagctgtttgggaatatagtctatcgagccgagtttcatgctttccacggcggtattaacttcggcgtagtcggtcataatgatgaagggctgcatctttccctcctttcgcatccagcacaaaaggtctatgccactgccgtcaggcagacgcaggtcggcaaccacgatatcattatctgttgcctgttgcagatgtttcttcgcggttgagaggtggtaagccttcatattgcggtagccctcccgtgacagcatattgcagacatattcgcaatacacgatgttgtcttccaccacaattatttttgtcttattcatcttcgtattttctcctttcctcttctgccaaccgtattatttccactcccttatccagcacggcagtcacggcatggcttaacgcttcaccatccgggagagcatcgccacgaagcaatccgtaaagtacattcagcggttggtcggcacggagcacctcccacgaactgcgcaggtggtggatcagggaatccagcttttgcaggtctttttcttttgctgcatcccgtaccgcctgcatttccttttctgtttcagttatcaacttttccagcatgacggcttcattgccataggacaataaggcggaaaagtccggtttcccgtccggtgtcgcttttatggcacacctgtcggaaacctccatcagttccgatatggagaacggtttgaacaggcatccggcaaagccttttgccaatagttcccctttgttacaactgcccgaagcggttgccacaaccaccgggattgttggtgaattgcccacgttggacgaacgcaacagttccagcaattcgaaaccgtttatatcgggcatattcaagtctgtcagcaacaggctgtattctttctggcgtatcatttccatcagtgccgcagcatcggtgcaagtgtcgcagtgtattccttcttgggaatacatctctttcagcatcagaagtaatacctcatcattgtcaatggcgacaacatcatggaatttattgttatgataaacaggtgtattgcttgtatatccaagctgttcttcagcttcctgcatagaaatttcaactgtgaaacgactgcctttccctttcttgctgtctaaacggattgttccgccaagcatcgacacaatattacgcattatggcaagcccaagcccgaaaccctcctttgcggcggcatttgatagacgttcaaacgcaccgaacgcttgtttctgttcctcttctgtcatgcctgtacctgtatcttcaacgaccagtgtcagaactccattatcatattcagtaatcaaagaaacaccgccttcttctgtgaacttgacagcgtttgacagcaggttattcccgatttgtattattcgctctttgtcggtcaatacaatggcatcgtgtccagtcttcacggacaaggacagccctttgttcacggcaacaggcatgaactccgtttcaagtgtgtgcgtgattgctgaaatccggcagggtgacagacggggctgttccttgccgttgtccaggcggaagaagtcaagcaaagtgttaagcatatcccgcatacggtcggaggattgcagtatgttttggatatactgcccggacttatcctcacactgttctttccgtatcagtccggcatagcctgttattgctgtcagcggtgtgcgcagttcatgggtgatagtatgtaccgccttcttccttgacgttatcagtgcctcgttccgttgtacggattgttccagttgccttatcaaatcagttgtcttgtgcttgtattgtttaatgctttttgcatcacgatgtatgatgatgtaggaaattaacaacaatagaagaacgaatcccattaaaccgcctacttgcataaatgacttttcacgcatggcaactatttcgttttcccggctttgcagttcggtttgtaccttttcttctatttggcaaatcaattcttgcagttgtctgttaagttctgcattacgagctgcaaggctgtcggcttgttccgacaattggcgatcctgcactttctgttcgctgattacgtttctattgaccgaatgaaggatagtggttgatactgctggagttacttccttttttttgccgaatatgcctaagaaaccttttcgttttggctttttggactgttcctgcacacttttctgtacaataaccggaatttgattggctatcttcttgttaatagattgttgttcatccattaaccggactatctggaacatctgtcgttccttatcctctaaaagactgcgcacactatcgatgcgctctgctggataggtggccttgaaacggcagagcatactgtccattgccatacgccgtgcatggtaatgctcgatatctttatcgttccattccagtattgtttcacccaatagagaaaattttatcatttgaatattgatattgtttatttcttttcggagctcgtctatttttttattgccaagttctaatgcttctatctcctgccattcatagaggctattatatgccatacatccgataagaatggagataagtatatatcccaaccgtattgccttatagaaatttcctgaccgctccattattttaatgacattgatttttggaacatgaataaaagtttatctttttcgttcatgcggatattatcagaataaccgtcttttgttatttgatacccacatggcttaaccataaaaatgcctaagcccttagtgtacgaacttacttctgaggcatagtctttacttgtatttaatggaactttccctttaatatgacaccactcattattacaactgatgtcttcaatctcagacatcagtttttgcaaatctgtaatagctttggaactcgctacttggggtatctgcaactcaaaacagagcatcggttcgagaatgtccacacctgactgttgcaaagccagcctgaagacataaggggtcagctgtctgaaatcagcaggtgtacttaccgggctataatactcggcttgagtaaaagttactttcagatctgtcacttcccatccatgtaaaccagattggcaagacatacgaatcccttcaaaaacggcattttgaaaagaatggttcagataaccataggagatgtcactttcgatttgcaaccctgcccctaacggtaagggttcaagagtcagccctattgtggcccagtaagggttgggtggtacttcgatctgaataatcttattgaccttttttataggtcgttctttgtagatagtcttgatctcatcaaaatggacctttacggaaaatcgttcttccagcaatgtctgtatgatttccttttgggtcaaaccatataacgagatttccaattcatcactatatgagtttatggaaaaggacaaagacgggtcttcaatccacaatgtattcagagcggatatcaccttgcttctctcttcgggcttatttggccggacggaggatttgagagcgggatgctgatgagataatccttgaatcaaacaaggtttagcacctaaataatctccgattcgaaaatcttctatatcttctacaatcgcgatatcattggcacccacttcatcaacatttatctctctgccctgataaatagtctttagatttttaatcttgatgaatttttccgaatcgttgattcttacaacgtctcgaagtctcagacttccgtcaattattttaagaaaacttcttttatgccctttggggtcatgctctatcttatagagataagctgaaagtctgtttgagactgatgccggaggaagtataaaagaagaaatggcgtccaacaactcattgataccgatattgaacattgctgatccatgtagcaccggatagactttggcttttgccacaagagcgattatcgtattccaataatcagccggtgaaatttcgctatccgccaaatatcgttctaatatatcgtcgtcatggttgcatacaaattctttgtattcttcctttatatatgtttgggagcaaaccggataaaccgatccatcgacaacagtttgcataaacaggacatcttgcgacagatttgtttttatatccatatacaaacgctccaaattcacaccggcacggtcaatcttattgataaatataattgtcgggatttgcagcttttgtaaagtactgaacagcaactttgtctgcgcttgtatgccttcctttgcggataagatgaggactgctccatcaagcattttgaatgtccgctccacttccgcaataaaatccatgtgtcccggagtgtcaatgatattgcatttcactccattccagataatagatgtcgtagaagcccggacagtaattcctctacgtttctctatatccatagagtccgttatggtgtcaccattatccacacggccgcacttttccgttgctccactggcaaacagcagattctcggttacggaagtttttcctgcatcaatgtgagcaagaattcctaaatttataatattcatttggattaagcaataatatactacagtagatgcattgtcgaaacgcaccttttaatacctcctcgtagcatatgagaactacaggattactaactcgtattaatatgtatattattactgccgcataacgattacaaaattacacaaaaaaatatatctaacaaaagtgggaggattttttaactttttaccatagacattttattagggaagcgtaggttcaactggcaagtacaaataagtagaaatgtttgaacaacaccgttttaggaagttgaaaaatcaagtttctctctcggtatagcgtttattttggccaatatcttctttagtttagcatttgtgtatttcccattcgtgttctatttagctccttattatgagtatgtagcaagttacttatcaaattcagcctctttgagggtcaaatatggttttgcaaatggtgactgacaagacataaacaaggtcagcaggaattttttacataaatggacatgaatgtatataacctaaaataagaataaattttaataagggctgcccaaaaagaaaaaaatgcagttgccatcctatagatacttgcagaaaggataaaatttacttttagaccttttgggatagcccttattaatacttcagataaaattccttaggttatattttcaatcctttggaccgggtttcctccttggcatacagtcccggacgcccgattatgacatggttggcaacgatactatccgccggactgcgtatctgcggcggtgcattttcgggatattgcgcctgcctgttcctcacatcttccgcttccggcttgagctgttgcccttcattctccttttctgcgacttcgggcgtgggtggcgcaagctccagctgaatttttcggtcaagggcggcaagttcggacttcaactgcttcagctcgtcctccttcttccacaccttacccgctatctcctgtaactgcggtatctccatctccagcacctcgttcttcgccttgtactggtcgatgatggagggtatcctctccatcgcgttgaggaagttgcgggcggcggccaacgggtcagccatcgccagatgcccgttgttgtaggtgtacttgtagttcccctcgaccacgaagcggttgtcggtgaactccaatccctctttgagtatcctttcgctcaccacctttatcggaaaaccgtaaagttcaccgacctgcgtgtacaaccctccggtcgtggcattcttggctatctcctgcaaacgctttccgatgaccttctcatcggcggaatccactccgtccacctttattatattaaggcggttgccctccttgtcggtctgcaccaccgacaggaagcggttccagtcctccgtcatggcatctatgaaagccgtgttgttgcgcaactcgccggtctttgactccagcttgaactccgaatcacgcttgcccttgttgaacgacttgcgttccccttcgagcgatgcgatccgcttttccagtttcgccttgtccaacaggtcggtattgccggagagcaacgccatgtattccgagaaattcatgcccgatttttcgtccattgccccctcgtcgatggtacgcgcacccatcgcaccgcttttgagctggcttatgaaagtctgcttgcagtgcaggaggttgaacttgtagctgtccagtgacttctccaccgcgtagatgattacatccacgttgttcccggcgaaatgtttggcaatctcattacctgccctaactccgcgtccgtcacgctgttgcaagtcggacggtcgatcgggtaggtcaagggcattactgccctcttcccccctcagaaccgtacgtgagggtttcccctcatacggctcaagcttttcaaagtctctgttcgtgtgcagagaccggctcatcctacttcttgtttccattgtttttacgggataatttgaaacattcatcatgaaccaacagattgcatttccgtccgtcttggacggttggcattacgttccatgccttatacgtgtcaatcggttcaccacatatcggacatttccgcccttgcttttcccataggtaaagcagggacttacgtcctttcagtgtcacaagcatctttgacttcattcttttattgaagtacaggcggcagtctgcgtcaaacggattcatatccccttttatctgcgtatattgcaggaaaggaaacgaagatgccagtttcagcaaagtgagttggtcttccttgccgtttgatttcttgaacttagccgcaaaagtccagctgttccctcggatattgtgccaataacggtcttttatccaccgttttcctttcttggaatggcggcgtttagcccattgccacaaggcgagaaatatctgatggtcgattctgtgaaaagaatcacgtgtcgccccatgctgataatatgctccccatcctcggattttagcattcaacattctgattaatgattcctgcttgcaacccttatgaccttttgtaaccttacggatattttccataaagcgtttttcggctttcttggtcggctttgtcaatatttcattgccgtatttgcgaatattgaaaccgaggaaatcgaaaccgtcacgaatgttggttatcaccgtcttttcttcggataaggtcaaacctctttcagacataaagtcggctaccaatggcttgatttctttttcaagtgtttcacggttctcgcaggtaattataaagtcatcagcatagcggacaagattcaccattggcgaatataacttgccttttattctaactcgtttatatttctctgcaaggactttctgcaatccgtccaatgtcatattggcaagcgtgggagagataatgccaccttgtggcgttccctcctctgtcgggaacatctgtttgttgaagatatagccgcatttcaaccattttcggagtattgctttgtccatagggatgttggcaagcaaccattcatggctgatatggtcgaagcacccctttatgtcaccctccaaaatccattcgggagaatagcctttccggagaatgttatgacattgctgtaccgcatccatacagcgacgttccttgcggaaaccgtacgaacgtgtgtcggctgttgtttccgacactggttccaatgccatgaggtaaagtgcttgcatggctctgtctttcattgtcggtattcccaacggtcgcagtttgccattactctttttgatgtggactcttctcaatggcttcggcaggtagcctctgcgtttgagctcacttatcgcttgtgtttttgcttcgggtttctcccatgtttccatgtccaccccgggggtgctaccacctccgttagaagtaactctctttacggctaaggcttttgcgtaaaaagagtgggtcagcgtccactgcaaggctttcaccttgcccgttctgccttccttctgagcctttacaatgcgagcttgaagcttcttaacagcctgctccgctttggtccagtctatcctgtcccaattcgtttgcaagttatcagtcggtgcacacgattggtcgaggagtttttctttgattttatcgttcatttgcattcctactttaaaaaagttctaaaagtctattgtaaagaatcaccatttggcaacattcggtttgttttgcctaccgagtgtcgccacagaagtctgcccactttcgtgtcggatgatgtcgcctacatcagcccgtgatgtcggttcaatccgtatccgttccattacagaacggcattcgctttttctgttatcttatacctgcacaccattcggctttcattgctgtcagcttacctgccatttttacatggcaggagatatacaggcttaccatgttccacatagataactaacggataggttaggttctgtctcatcctccggcggtgcttatatccgtgtaatcctaccatggaaaggattaaccgaccgcttcccttttgggtagagtgtaccagtatcttacactctttcgtgacattacgaagtttactaacagttcgcttgcgctaaccatactatcctgcctcgccactctacggtatgatactaaccgtacttgacttcccctcacggttctgtcttgtcttgcgaaagtgtactttgtcccaaccgcttaatacaactattaaggtgcatcggtggtaggctaccgctgacggaacagcgggttaaagctgatacccgtaagtatcattccaacaattatctatgcgacttcatgtcgcacccacggcgtatcgagatgatggatagccacacaccgtttctgggcgttcacacccgttccgagcatagaggtagagccgaacagcacacgcaccgtcccggcgttcatggcgtctatcaccgccttccgcgccttgtcggtcttgcactcctgaatgaagcgcacctcgcttggcggtataccgtagtcctccgtcagtttgcgcttgatttccgaatagacgttccacccgtcgcccggctggtatgtccccaaatcagagaaaacgaactgcgtgcctttctgggcgtcgtatttttgataatactccgcgatcatcttggcacagtgactcgctttgttgtcgggatgatcttcgtaattcgggtctatcatgcgcatgtcgagtgccattttccgggcatagtccgtggcgatgagcatcttcgccttttcttccgtttccgaaagcggcagcctgcccaacaaggtggcatcgcccgtcttggcgaactgcatcagtttctgtatgaagtcctcctgttccggcgtgggcggtatatggtgcagtatctcgttcttggcaggacggtcaacgcccacatcctccgccgtgcggtagtccgtgatttcattatagaaggcggcaagctccggcactttgatgaagtagcggaaacgctccttctggaccacattgttcgtcacgttaaattcaaaatccgtcgtcttcttggcaaatatcgccgcccaagcgtcgaaacaccttatgtcctgccgttccagctccttcgggcgcaggtacttgaacagcaggtacaattcagtcagtgagttgctgatagtcgtgccggagaggaaggtcgcacccaagtcttttcctgtgcgctcctgtatggtgcgtatggcaaagagcatgttaagtgccttctggcttccctcgctgtttcccaatcccgccacacggtcgtggcgcgtgttgaaagtcagattcttgaactggtggctctcatctatgaagatgtggtcgatgcccatctgcttgaaatccaccacgtcgtccgtgcgtgactttatggcgtgttccaccttctccagcttcgcttcaaggttgtgcttgcgcttctccaatcctttcagcatcgcccgcgacacgttctttccctgctgccgtagcacttcgaggttttcctccaccgtgtcaagctctgcttgcaggatgcgctgctgcaattccggcgactgcggtatcttgccgaactggtcgtgcgacatgatgacgcaatcgtagtcgttgttctttatattattgaagaagcgcacacggttggcggtcgaaaagtccttctccgaagcgtacagaatacgtgcgttgggatatgccgcctgataggtggctgcaatctccgcaacgttggctttcagcccgataatcatcggcttgtgtgccaaattcagacgcttcatctcatgcgcggcgatgcacattatcagcgtcttaccggttcccacctcgtggtcgcaaattccgccgccgttctgtttcaacatccagacgcaatccatctgtgagggatagacgctcttgataccccggcttgccagccctttcaggttgaggtcgggaaaggtctgatgggagccgtcgtagcgcgggcgcacgaaacagttgaacttgcggttatacatcgtcacaagccgctccttgaactgcggcgactgctcttcgagccattcggagaagccgtttcgtatctcgtcaatcttggcgttggcgagttgtattccctcgctgtcgcgcatcttgatgtcgttgccatgctcgtccttgccgatggacttcatcatgtcagggcaggtgttgtgcagggcgtgttttaggaggtgcataccgtcatagttccggtaataccccttcaccagaaactcgtccgtgattttcatggtgcggtagccgcacaccaccgaaaactcgtccatgcttgcggaataggcgattttcacctccgtgtcgaacagccggctcatgtaggcggcatagacacccgtcggaatccagcgttccccgaaattgaagtccagatcctcgaaggcgatgcgctgcggctcggcatctttcagagcctccaacgcctgcttcacctccggcatacgctcattttcgggattgtcacccatccatgcctctatgcgttccgctttctctatgacatttccggcgatgaaacggtctttgatttcgtaaccggtcacgagcggattgtagtagatgcgcccttgcagggcagtgagcaaatcctccgccgtgctgtcggttatctcccgcatatagtcgagattgaccgtaccatatttgttgagcgacgcagacagggcttcttcgggagagcctacgttggcatggctctccaccgcgaaggaaacaggatgctcgaagatgtccgccttgacgaactttccgttttccatccgttccagcgaaaggatgtcgcgcccgcccgcatccatcatcactaacttcacgttctgcttggcgttgaggttgccgtagcgcatgacaaactcatcgtaacaggtattcagatgctctcgccacggaacatttgcctcgcgccggagcgattcataacggtacagacgctcgtaggcgtcacgcagcgacacatacaacaacgccttttccttctggtatcctttcaggtcgagcggctggaatgtcgccccgtatggcgtgatgtctttcaggtagccgatgttatgacgcccccggtcagccaccagcgacccttcgcgcaggtgcatctccggcgtgcggtggtaggcacgcggagaaaggtccacgacttcctccttcggcttttccgcttcgatgtcggggaaaaggaaagtccccaccgcttccgatggggtatctgtaacggcaggtgcggcgactgcctccggctgtgtttcctcctgtcgtggctgctcacgggaagtttccggcacggctttcacttccgtcttttccgccacttgtttctcgttatgctgccttgccagttcccgaagttctttcctacgctccggcgtcaaacccatcatcatttcatagaaaccgttgatgggaggattggtatcccagtccagtgtggcatagatgtcgtccgggtcggcaggcttggcggtgttctccgctttcacctccttattctccattgcgggttttgcagttggagctgtcggtgtaaccgtgactttcggtttgggcggagtggactttgccgtaactgcctttttcaccgtctttttctttttggaggttttcggttggctgacctcttccgtcatcccccagaggtcaagcagggtgagctgcacgcctgcggaatattgcgggcgcggttctatctccggcttttcatctgcgggttgcggcttttctgtcggagtttccaccgtctgcgccgaggatactgtttccaattttatggcaggacgctctactttattttgaacggcaactttttcttccgttcctgcctgccggattgaacccgaatacaagcgcatggcaagcctgtaatggaaatcctcgtcgagcatacggcgcaaatccccggcgatgcctgctgccttgccctcgtgcagataaaccatagcgggcttcccgtaggggtctgtgtcaagtttcgccatcgtatgcacgatgcgttccgggtggtggatgaaataggcgttgtcggtcagggcggttttcgtgtccgtctgtatcacggtcatcagccgctcgtcctgcgacatttccttcttgctgaggttcttttgcaggacaatcaggtcactgcccacctccgtgcccgcgttgtccgtgaacaggttgttgggcaggcgtatcgcggataccagattggcctgactgaacagctcgttacgcacggaggtcttggtgctattcaataccccttgcgaggtgatgaacgccacgataccgccgtcacgcacggcatccagtcctttgagaaagaaatagttgtggatggttttctgggcggagcgtctgccgaaagagtcgctccgctgaaactccgcgtcgaacacggcaatgtcaccgaacggaatgttggacaccgccaagtcgaaataattgttgaacggtctttcgattttctcaaaaccgcaggtgcgcattttctggtcgggatagagatgcctcaagattgtacccgtgagcagatccttctcgaaagccatcacatccgcattggggctgtgccgcagcatggaatccacgaacacgccgacacctgccgacggttcgagcatacgggcggggcggacgctgtaatctgccagcacgtccgcgatggtgtcggttatctctttgggggtgtagaaagcggtcagcacggacgctttcagcgaatccacaaaccgcttgtactctgtttcgtccttgctgttctcacggataagcctgtgcagctccaccgtcggggcgaacagttcgaggtcggatttcgcccaccggacggcatccgtcagttcctttgcagggttgaggatacatttcagaccgccgaaaccgcagtacctttgaagtatggcacgctcttcggttgtcgctgtcctattttccctgtcaaggatgaatgccgtccgtatcgcctcgatgttgtcccgcagtttctgtttgcggttaaacgccatattcgtctaagtaaaggacggttgctcccgtcagctccgtgtagagcaggtcgtaatcggaagacagggcgaaattgtcatccgagaggtcatagacggagaacacgttgccgacaagcggcagcagtttcaggacaaaggcttcacgcttctcttccggcacttcatcggcaaactcgttttccacgacttcgcggaggatggcgtaacgggaataatgcagcccgcgcagcagcgtgtccatcgccagttcctgcgcaccatcggcgggatagccttcaagccgtgccctctcatacgtttcggcggcacggtcggcccgttcccgtatgaaagcggtgtcgtcagcctgttcaaacttgttcgtgcggagatagtccagcaggtacagaccgtaataggaaaagtcggtctgaccctcgtttttcttcttgttgttcattactttggatttagcggattgataattaacgggataatcggttggaaaaaggaagaaaaaggcactcggtatccctccgagtgccaccactaaatccaaagtatgagtgtaatccggtatcgaagaacaattcattactctgaacaagtggcaaagttaatactatttcttccgtcctgaaaatttcttgtcctttttagcctccgggaacacaaaagtcgtgttatattccccgtcaaaggcgacaacagcatcgaaactcttgccctgtttgctcttgaaccctttgagcagcttggtatgcccttcggtgagcaggtctttgatttcatcgtcggacagggtgcgtcccgctttcagccggaacacgggcagtccgcactccgtgttgtcgcagcgtaccaccttgccgtagaaccgcatcctgcccgtgccacacttgggacacgcgcagccggagtcacggctgccgaagagcttgtcgcacgagatcagttcggaggttatctcacgtgtgtacgcctctatctccttgcggaaggtgtcgtcggacagttccccgcgctcgatacgcgccagctccttttcccattcgcccgtcatggcaacatcggcgatgcgcatcgtcttgacgacggaattgagggcaagtcctttttcggtgggaacaagcgacttcttgcagcgttccatgtaaccgcgcttgaaaagcgtttcgatgatggaggcgcgtgtggcgggagtaccgatgccacagtccttcatcgcctgccgcagtgcgtcgtcctcaatttccttgcccgccgtttccattgccgagagcagggtggcttcggtatgcagcggcttgggtttggtctttccttcggtaatggacgagcctttcggtgtcagcgtgtcgccttcctgccagccggggatggtaatttcctctttttcctcgccatagacggcacgccatccggtttgcttcacgacgctgccttttacggtaaactccactccggcacattccgccgtgacagtggtcacatccttgacgcatttctcagagaatgcctcgaccatgcgcccggcaatcatctgatagatggtattgtcctctttggagaggaagagcggtttctcacccgtgacgagcagggcatggtggtctgtcaccttgccgtcgtccacgctgcggcgtgtcggggcggcttttgcccgcaccttgtctttccattcgggctgtgtgccgatgaaagcgagcagtttgggaatttcggcaaacacgtcttcggggatgtagcggcttcccgttctcggataggttatcaacttcttttcgtagagtttctgcgcgatttcaagcgtctgttccgccgtgaagccgtgcttggcgttggcttctttctggagcgtggtcaggtcgtagagcaagggagtttcctccgtcttctccttgcgctcggctttcgtgacagtggcgcaacctgccgcctttaccttattatatagttccatcgccggttctttctctttccatttctcggaggatgagaatttcacgacttcgccgtcgcaaccgtccgttgcgatatggagctgccagaatgcttcggacgtaaagcggcggttctcccagtagcgttcacataccatagccaacgttggtgtctgcacccgccccacggaatacgtgccgtgtccggcggcgatggataacgcctgtgtgccgttgatgcccacgagccagtcggattcgctccgcgctttggcggcgaggtagaggttgtcgtatttgctgccgtcttcgagtttccgcagtccctcgcggatagctttgtcggtgagagagctgatccacaggcgcacgaaaggagtggtgcaacccgtatagtggtagaggtagcggaagataagctctccctcgcgtccggcatcggtcgccacgatgatatgttcgcttgtgtcgaacagtcttttgatgacttttatctgcgacaccacgccgctgtcgggcttgtaacctttctccgtcctgacctgacgggggacgagcgtgaatgtgtcgggaataatcgggaggttgtcacggacaaatccgcgcacgccgtagccgtcgggcatggcaagctgaacgaggtgtccgaatgcccatgtcacggcataaccgcctccctcgaaatatccttcctctctctttgtcgcgcccacgatgcgggcgatttcacgtgccacggagggcttttctgcaatgattgtcttcatgtcttcttcttttttgttgatactttggattttattttggattcagtggcggacacgggattacattttcatgcccttgcccgttttcttctgcggcttctcctgctgctgttgctggcgggcgtccttcgggttggtctgacctttctgcaacggctctctcagattctttgtagcctcgttggtcttgccatcgttgttcaccgccacctgcgtgcggctctcgttggacggagcaacctgctgtgcattgtcagggttcgtgtcgtagcggtacgggcgtcccttctccgggttgaacttgatatacatcgtggcatggaagccctgcttgtcggtcacgttctccagcttcacggctttacccgccacatagtcggctttctgctggtcggtgaagctcacgccgctccatttgctgatggggcggatgctgccgtcctcgttcgtccacgtgttgcggcgttgctccttcttggtctgtgcggcattttccccgccctgcgcctgacttttcgatgtgtcgcctttggtttcctgtgtctgtgcggtacggggcgacttgccggttcccggcacgaactccacgccgcgctgctccacgttcacttgcagggtggtgacgaactttctgccgtcgttgcgctcgatgagcttgtcgcgtacgggcagtccggcgcggagcatgtcccgctcctgcgtggtgatttccgtcttgccgatgcgctccgggatgcgcaccctgcttgccggaatgtccgtgatttcattcgtcttgcggtcgatgctgatgtaggaggggatgatctcgcccgtttccctgtccacaatgtccacgaccctaccgagattgcccgtttcgcggaggttcttccggtcattgtcggagaatttgtgttccttgtactcatccagcttctgctccttgcggatgaagtgcggcacgaggctgatgtttccctcaccgtccttcttgaaggagaggcgggcgtccagctcgaatgattcgccgccgaaggtcggtttgacctttaccaagtcggacttgccatagttgagcatcttcgtaaggtcgccggacttttcaaggttgtcccgctttacgccccatctgtcctccagctcctgccagttgattttactctcgtcgatgggctggtagccacgtttgccctgcatctgttcggatttgtcctgttgctgttctttccgttgttccatgttctcctgtttttgaggttcttgtttctctgtctgttgtgctgccatctcttcctgcaccttcttctcatagtcggaggtgtccaccttgtgaggggcgagcagctccttgttcgcttcggggtctttcagcagttgcttcatcacctctaagagattttcagcttggtctgccgcaatgcggtagaaaccgaagcggctgggttccttgcactgccggaagaagttcttgaagaagttgtccagcacgtcgccatgtcggtcgaattgcaggaaactctgcgcgttctccgcttttgcgggggtgcgcttgggtgtgccgtccgcgttcagcccggctaccacgctgatctcgcctgtcttctcgtcacggactaccagcacgtccttttcgtcttttttctttgccatctgaaaaatgttttaatgggttatttatgaaagaaattatggatacgagccttgtagaaggctatatcttcctttttgaagtccttgatatggttggaaaggaatgtcagcacgtcctcctcgctgtaataggtcttcttgcccagcgtcttgtagggcaatgcgcctacgctgcggtagcgttggagggtgcgtttgcttatctggagcaacatgcacaaatcctgattgtcgaaaaggcggatgctttccgtgatagtgggctgtttcccctcagccttcatcgccagcagcagttcgtcctgacggtcgagccgttccatcagcttctgcatccagccctcgaagttgtttcgtgtgagcagttccatgacctatgtcctccttccttttggtttgccgcccgtgcgcagcgtgtggttgtggaacagggtgtctattgtcccttcctcgttccttactgtgttgtcctccaatagccgcagtatctcggaaaggcggtagcggcagcttccgcgtaccaccacatactcgatacggtggtcggtgcgcatacgctgcatggtgcgcttgctcacgttgagcatcttcgccgcctgtgccgtgtcaagcagcttgtcttcggtttcccgcttccgtttcttctcgtcccttgcctcgcggatgtaccctgcgatgttcgcaatctgcgccatcatctccttgtaggcggaactttccattgttatcactttcatgttcagtcctttctttttgtttctgcgacaaaattcggcaataaacaaaaggggctttaacaactcactacgtgactcacgtaagatttttgcggaagatggctccgtaacccggtcaaacggcgcaacaggcagcctttcagcggaaaacgatacgtcttgtatgccgtttcgttacctttgcggcaaactctaaatgacatgaatatggaaatagtatctatcgagaaaaagactttcgagatgatggtggcggcattcggcgcactctcggagaaggtcgccgccctgaggcgcaaaagcgacacggggcgcatggaaagatggctcacgggcgaggaggtctgcgggcagttgagaataagcccgcgcacgttgcagacgctgcgtgacaggcggcttatcggctactcgcagataaaccgcaggttctattacaagccagaggaggtgaagcggctgataccgcttgtcggcacgctctatccgcacggcagatgatttgatttattcacccactgaatccgaagttatgatgaacgagaacaacgatgtttttacgatggaagacgagccgatagcctctgtggtgcaggatatgcgcaaaggctcgaaatggctgtccgcatttctggaaagctaccgtcctccgctggacggggaacgttacctgacggacggcgaggtgtcggaactgctccgtgtgagccggcgcaccttgcaggaataccgcaacaaccgcgtgttgcccttcatacttttgggagggaaggtgctttacccggaaacggggctgcgcggggtactggaagcgaactaccgcaagccgctggagtgaggcggtttcatgaaaaagtaaacgggtgacaccttttgtggtgctacccgtttacttgtcttatggggtatgtgcaatcagcaatacccggcttttccgttctgtatgaacatcacgtatgtctgccgtttctcttgtgagagtgcctttcccaccagccatgtgcggaacaggtgggtgttgtaggtattcaccctgaaagcgaccgggatgatgatttcaagggcgtacacgtccgcgtgcagcccgttttcaagctgcatgtagcggcacacctcgtagtcgttcagcacgtccgacttgcggacggctctgatggcggcgttcactgccgggacggtcgtatggaacaatccggctatttcggtggcggtcatccacacgtcgttaccggttacgctgactgccttgtcctcgatgatgattgtgtcacgtttcatggcttttctttttagatggtgcaacctgcaaattcctcgacgccgttcaatcttgcggcaaggttctccatgtcctgattgagcttctctttggttatctttgcgtaaatctgcgtcgtctttatgctcttgtgtccgagcatggagctgaccgtttcgatgggaacaccgttggagaggaatatcgtcgtggctgccgtgtggcggctctgatgccacgtgatatgcttggtgatgccgcaacgcttggcgacggcacggataccggcaaggcacgtgttataatgcggaacgggaaatatcctgccgtccccgcacagtccccggtatttgccgattatgcggttggcgatgtcgagcaggcggatgttggacaccacgcccgttttctggcggttgatgtttatccactcgtgttcgtcgaagtaggtgcggatattctcttccgtaaggttgcgcatatccgcgaacgacagccccgtgaaggcgcagaacaggtagaggtcgcggtacaattcctgtttggcgtttttcagtttcccctccatcagcaggcggatctcatctttggtcaggaaactgcgtgttgtttcctccttcttgatttcatactcgcggaacgggtcgcgcgtcagccactcgttgttgatggcgatgaataccatcgtccgtaacgggcagacgtacagccacacggtattggtgcagcagtgcttgtccgtgcgcaggaacatctcgaagtcggagatgaaagccggggtaagctcttttagggcgatgtccttcacatggtagcggatgtcgaggaactcttgcatgtgcttgtaaacggtgcggtacttcagcagcgtgcctttggctttcatgcctgcctccacctgcttctcgtagtcctcgttgtgctggcggaacacctgcatcagcgtgtggtagcggtgttccagtccgagaaaggcgttcttcaccttctccgccgtgacgaagttgtcacgctccatgatttcctgataatgcctgttgatgcgtacccgcatcttgtcaagcatacggttcgtttcgagtgccgccgtgcttctgcccgtgacacgtccacctttggtgtcccacagtttcggatcgacagtcagtttgcagctgaactgtgtctggctgccgtccaccgtgatgcgtcccatgacgggaactgtcccgtcctttttcactacctgacgcttgaggtagtagattactgaaaatgtactcttcattgtccttaatttttgggtttcaaaattagttggtgaagagtccggtgttggtacgcaaaacggggaggaacggcgcaatctttttccgtaacctgatttttcgcatgagttatggataactcactattccttagagccttgtttcgctattcgtacccgtttgtcgcattttcgggcatggttacgaacaagtaacgtagcggcgtcaggatttggcttcggcagggattgtaatggcttcacggattatcgccacttcaaccaaaacccttgtaactcaattctatcactatatctttccgcatttcacttttttgtagtaactttgcaaagaaaagatacgaagatacgacctgtttccattcaaggatatgaattgttggatgcccaaaaacaagctaatttgttagtctttctggcgggcatcgggcggtatattcttatgggattgcagttattgattactattccgctgattttcattattttcccgcaaacagaaggactggcttatcgtatattgggttatatctggaacccgatccgtggcatttttgtgggtattattgattatattcccaagctgtttacaatcattattatctggtatgcagtgcggtatctggtacgactggtgcactatctggcccgtgagatagaagcagggcgtttgaaattcaacggtttctatccggattgggcaatgccgactttccatatcgtccgtttcctgctttacgcatttatgattgcgatgatttatccttatttgccgggttctgattcaggggtattccaagggatttcggtatttgtcggattgattgtatcgttgggttcaagtacggtgatcggtaatattattgccgggctggtgattacgtatatgcgcccgtttaagttgggcgaccggattaaactgaatgatactaccggagatattatagagaaaacaccccttgtcacccgtatccgtacaccgaagaatgaggtggttaccgttcccaactcatttatcatgtcctcgcataccgtgaattacagtacctcggcacgtgaatacgggttgattatccattcggaagtatctatcggatatgatatcccttggcggcaagtcaatcagatattgattgatgcggcattgaatactcccggagtggtggacgatccgcgtccgttcgtgttggaaacatctttaagtgactggtatccggtttatcagattaatgcttatatcaaggaagcggataagatgactcaaatctattcggacttgcaccagaacattcaagataaatttaatgaggcgggcattgaaatcatgtccccgcattatatggctgtccgggatggaaacgagacgacaatccccaaagatgacttgagagaaaaatcaggaaaatagtttctttactctatgatactttcttgatagatgatgtaatgaggaagtttctttctcatccggcaggaatcagactttcccgcaacggatcagtattttctgtccatcgtttaaggtgctggcaaagaggtaggtatctcccccttccgctaacttgatacgtttacggagttctgccaccgtagccggaaagttgcggactgtgatattcgcttttttcaggtctgacagattctcctttatttcctttttgttgaggctgcaccggttgatgatgcggaatgttctgccgggaaaaccctcaatctgcgtatcggaagtgtagagatgactgttgggatgcagcttcttgacggagtaagccgcggcaatgctgcggaaagcaccggctttcaggagagaagcattgggttcgtacagataattgccaagtgtgtctgtatagctgcactcgctgtgctgttcctgttcgcgggtaaatacgaagagttgtttttcctgctctccttttgtggagaggtttacgcagtgaaccgggatttcttccggtgctgtctgtccgagtaacaacaggagttctttgcattcgttattgacggagatgatatgtacctcctgtgtgtgcggcaattctttcagtgcctgtgaaaggtcgagcatgggggaaagtttaatcattatccggttggctttgctcaacaggagtccttcgagttcggccacattaggctcacagtcggaaatggcaacggtttttccgccgtgctcattgcggcgggcggggtcgagaaagatacagtctaccggagacatggtttccagataggctactccgtcgtcgtttctgacacttatatggttgaggtcgagtgcgggaaagttgtgggctgctatggtgcagagttctgcctgacgttctacgtaagtagccgatcggaatccggtggcgaggaaagagcagtcgattccgaatcctccggtcaggtcggccagagactcaccttgcaggaggcttgctttataacgggcggtgatttctgaagaacattgctccagtgaaagatgtttcggataccatatatcgtctatctctttccaggaggggattttctcggctgcgatttgccgtcctgctatttgggtgatagcagccggtatgtctacatcggggtatttccgggcttgcagggccaggttgcgtacatcgtcggattgatgttcgttgataaactgtcgggtttcgggagagattggagtcataggtcgttattgttcgggaagtgagataaataagtctgatgtccggatattgccttgttatttatggtattaccttatatttctgccttgctacatcccggctacaaaagttgaagtgccaccattcgctgggcagggcgcgaaatccggcttctttcattactctccgcaacagtatccggttctgccgttccgcctcacttatttttccgtttcgtaccagttcactttcttgtgtgatatgggcttctatccccaagtggtctaccttggttcccataggcaagggttgtccgagagaatcctgaatgctgatgtctaccgccagtccgtagttgtgaagtccgccgccacggttcgggttggagacgtatttgtatttgggtgttcctttcactacattccacatctttttttgtacggacatcggacgggcggcatcgtagacaacgagattgtaggaaggatgcagttgtttcagtgcctcctgtgctttcacgagggcgtatgctgcgtcgggatgcagataggcttccgacaaatcatcgtaaagcacctctccggtgaaattgtcggcttgtgtgtacatcaacttcacggtgatactgctgtccagttccgctatattgaccagtcctaaagaatccatgtagagagccatggcacttttctttggttgaggggcaggggaacattcttcgcggggttgcatatcatccgacggatgtttgtattctgccatggtgagcctttccttttccttgtgaccggaaacggaagtacattctgccagaagcagacagaggacaggcaaactatattttagaaatctcattcgggcttttgtatttagtgcgtcaaagatacttctttttggctttagctccaataagctacctttaaatcctgattgttggagtgaccgggtgatgccacggggctgtcacagttgtgccaccggcttggcacaactgtgacacttcgatggcacaactgtgacaagccggtggcacaaggtagaggaataagggcttgtagcggctcttcctatcgccggatgttagcgactgctttcttcggattggctgttcctttccatacgtcaagcaggtgcaggatgtatccgctttcgcttttgctgttattgaccgatagtagttccgcatagatttcccgttcttcccagttcagcccttgcagaaaggggatgttggtggttgttacttgctgtcacaattgggtctttcagtatcgaaagttgggcgggagtcaggttgaaactggattgtactacgttggacagagcgatgaggcagcgtgccgtcatataaggttgcgtcaacttcccccaaaagaaacagggagcgtcttttttctctatttcactgtatttggcgaggcatagttcgtcctggtcggcagcgcgttgcaatgcagacagagcggcgtattgataagaaatggtatcagccatagttggataaataggtattgggttgcttattgccccaatatagaaatttatttcttgcaagaaaagaagttgcgggatttacattacttctgagggtatgtttcacattataagttgaataattgaagtttgtagaagtaatataactacaattctttataattttgaactattctttatacataaaaatattattctttataactaatattaaatcatattctgcatttaaatgtaaaatgatacctttgttcgagatttaaataccgtaatgacataatttaatttattaaatataccgtatgagccatttgtgaaaatcgctccaatattgtttgttttgtttgtgttatcccattttgagtgtcaagtgtgacatcagaatgggatttttattttctcagatagaactctttaaaattttacattgatccaaaacttgcccgtcttttatgttgagccgcttttatttaagaatagacatataacaaacaaagaagccttgtaaacattacatttacaaggcttcttatgtggaccagcctgggcttgaaccagggacctccagattatgagtctgttgctctaaccaactgagctacaagtccgatgtatccttttatcggatgcggtgacaaaagtagtattttctattgaattatgcaaattctttcaataaaaaactacgtgacttttcttctcagaatttatatttgcgtttcgggttcttggggaaccagcctttttttactctttcttcctgttcgaaaacctctttgattgtccagaaagaggagaaggcaaatacgcctagcagagaagctatgatgacgttctcgatgcttaatgaggcaactacaccggcaataccgagtatcaggaatatccaccagcattttgtgccccaataatattcggcctttaccacgacagggtgaaaaaggccgataatcaaaaaggtacaaattccgatgaataaccctgcaaggtgatattcacttagaaattccatgggcttacttttctactcggataggaatttcttttttgatgctttgctccagagaaatcaatgtctcggtagctactacacccggtatctcttgcattttgttattcagcaaatccattaggtgttcattgtcacatgcataaagtttggtcagcatggtatacgggccagtggtgaagtgacattctacgatttccggaatcttctgcaactcggccactacagatttgtacatagagcctttttccagtttgatgccgacatacgtacatgttctgtatcccaatgatttcggatttacatgatagcctgagcctacgatgacacccaagtcaatcaatctctgcacacgttgatgaatagctgcgcgtgacactccgcattcggctgctacgtctttgaaagggatgcgggcattctgtgagataatctctagtatttgcctgtcgaggttgtctattctttccataataataaattgtaatttccagttgttatcaaatagtaagcaaatatagagatttattttaattattcttcttttccgagaaaaaaaataggaaaaagcaaaaaaaagaggggcaatcactttgcacctctttcctttttctatttagacagaaaattatttcttatctttctcgatactcaacagttcaacttcgaaaatcaaagtagagaacggtttgatctggccgcctgattctcttgcgccataagcaagatcctgcgggatataaagttcccatttagaacctacgggcatcatggtcaatgcttctgtccagcctttgataacttggttggcacggaaagtagccggttcgttacgtttgtaagagctatcgaattcagtaccatcgatcaaagtacctttgtagtttactttcactttgcaagtgtcggcaggaatttcacctttaccttcagtgataactttatattgcagaccgctcggagttgttttcacaccttctttagctttgttgtcggcaaggaatttttcgttttcagctttgtagtcagcatatttttcttccaaagcttttgttttgatagcttccatagctgtacgagtataagcctgagcagcttccatagacattacgccacctttttccagcgtacctgcgatgaaaccagccatgaagttgtctttgctgatagttttagtagagtcaccggcaaacagttcctgattgatgttttttatcataccgttctcgccgctgatttgctgaccgatttgaatacctgccatgtaagcaatgtcttttttgctggttttgcttacgccgtcgttcaaacctttgatgaattctgccatatatgcagtatcaacgttcaaacgacctgtcagatagcctttcagaccttgagtctgagccataccgatagaataagacagtgaatcgaggtctgatttcagatttgctttaggagcttgagctgtacaagaagcaaggcttgcagcagcggcgattgccataaaaatactaatttttttcattttgctttgaaatttttatttataatacttcaagtaattctacttcaaaaacgagtgtgctgtgaggaggaatcatttctccggcacctcttgcgccatagcccaggtccgatgggatatacagtttccatttagcaccttccgacatcaattgcagggcttctacccaacctggaattacctggttaacgccgaatacggcaggttcgccacgctggatagaactgtcgaacagggtgccgtctaccaacgtgccttcgtagtggcatcttacttggtcggtcgctttcggttttttgcctgtaccttcattgataacctcgtattgcaatccgctgggcagtgtaacaatacccggtctttttttgttttcttcgaggaaagcctttccttgttcaatggcgacagcgctcattttagcttccagttcttcgaagtatttgtttactatttcgcgggcttcattgtggctgatagccgtttgattaccttccagtacgtctctgattgcttgtgcaaaatcatctactgcgagaccttgaattcccatacttgataagttttgaccgattccaaggccaatagcgtaactaaatttatccatataatgttttttgttggcgattgaaatgtatcaccttcatggttttagctttcaatcaattgcaaatttatgaatcgcaaaagtacgtgttttatttgaatcatttagcatttggtatttaaaaattcttatatccgtgaaagttaactgcttttctttagattacttattcttttgttcctgagatttaatctcattgattctagtatttgtgtatagattatagtatatgtgatgctagtctttaggctacttcaacttaaatccccgcattttcgaagctagattattaggtgcaaaagttttcttttattcgatgattctgattacatttgtatatcttaaaatgaacagaaggaggaacgattatgaagaatctggtaatattgacgggtgctggtatgagtgccgagagtggaatcagtacgtttcgtgatgcaggcggtctgtgggaccggtatccggtggagcaagtggctactccggaaggctatcagcgcgaccctgcattggtgatcaacttttataatgaacgccggaaacagttgttggatgtgacgccgaatcgcgggcatgaattattggcggagctggaaaagaatttcagagtaacggtggtaacgcagaacattgataatttgcacgaaagagccggaagcagtcatattattcatctgcatggtgaactgacaaaagtatgttccagtcgtgatccttataatccccattatgtaaaggaattaaaacctgaagaatacgaggtgaaacttggagacaaggcgggagacggaacacagttgcggccttttatagtttggttcggcgaggcggtccccgaaattgagacagctattcaatatgtggagaaagcggacatttttgtaattatcggcacttcgcttaatgtgtatcctgcagcgggattacttcattatgtaccgcgggaagcagaggtgtatctcattgacccaaagtcggtggatacacatacttctcgtccggtacatgtgattcagaagggagcttctgaaggagtggctgagttgaaacagttgttgggcgtttaaaaccctttcctgtctttattccagttcagaggtaaaaatatgattattccggagcacttccgaaatttcgagtgcggtgatgccactgcactcgattcttaatattttttcccaatcctcaaagtctacattccatttgtcgatttggggatattgtgccagaagtttctcgatgcgtttgatgtcgcattttctggtgatagaagttcgaaaaatcagaatcttattttccatgtcttttagagttttattgatgtgaacggaactctcgaatggtcatattgaaatattgtctgaagttgcggcttaatagtgaaaggctgctaaaaccgcatagacgggcaatttcggtggcagaaagttccttgttcctctttaataattgtgctgctttttcaatccgggtgcgtttgatataatctgtgggagtttctcctgtcagaatagtaaatacgcgatggaagtggaaaggtgaaaaacaggcgatgcctgccattttctgtaatggtagtggctggtctatgttgttatggatgtagtcggtgactttgtttatccgtaacaggtattcttgcttatttaattctttcgtttccatatctttttgcaaagtaaaggataataattgccggagaactatcctattttgctaacttctccggcagctggcaattatcttttttgtcctatgtagaatacataaccataatattctttatacttgtcatacagactctgctcatgccgttgcccggcaatgaggtctgcggctgcggcatttcccgagtattccttcaaaaaagcttcctgggccgggaactggggagcatagaaatgttctgtccaacagttctccggtaaaatgaaatgggctgtcagtgtatagccggctttctccatttgtgctatttttgtcgggatagtatcaatttccgggtaattggcgagccagaagtcttctatttcggcagggcgttccggggtaaaccaggaggcttctgttacggcgatgaatccgtcctttttcaggaatctgttccattcgttcatgccacgttcgaatcctatattatagatagcgccttcggaccagataagatcgagttcttcgttttgaaacggcagattgtccattgagccgacaatgccttttactctgttttcgcaatgggtatttgctgcatttctgttgaagatctctataaaatcggggaaaaggtcgatgcctgtaatctgtccttttgtatagttagctaataccattgtctgtccgcctgtaccgcaaccaatatcggcgattttggcttcgtcagacagttcgttgatgaaacttacggctttttgtgtgacttcgggacttccgggaccttggcgttctaataacttgaagtaattacatatcattgtgaaatcgaaatcgtggattgattttaaatcgttactcattgttttttaatgttttaggtgtacgccaaatgaatgcatacaatgatgcccggctcattcgactatacaaattgttttaaaattcagataatagaatataactctgacatgactatgtcagagaaaacataagggataatctgtagtgagaggaagactaacagattatttacagaacggaatccttacggaatgaaaatgagttaaacatccaatttttcttttagttcgtggcaaagatatgttttttagagataaacgtccgtaaattctataaagaaaaatactgtaaacgtgcattttagcaagaatcgtcaagtgcatttttagtacttagtcgaataaatgatataaaaaggctatgtattgaagtaataattaagtattatttgtatttttgtaacttgaaatctaattatatattacatgaaaagaagctttatctttctcttgggccttttgtgtattataatggtggaggctaaaaaccattactttaaacatctgggagtttctgacggattatctcaggtttgtatattttcaatttatcaagatgagttgggtgcagtatggttaggcacttcggagggattaaacagatataatggtaaagatgtaaaaatattccgtccttcgcagggaaatgaaggtctgacgaataatgagatcaataaactgtgtggagataaaaaaggaagaatatatattcgttcgggtaatgacttgataaaatttgaactttataaagaacggtttacctgtttacttcggaatgatgtaagagatcttttctgtaaagaagatacgttgtgggttagttgcaaatctggtatctattattatacagctgaaagttcagaattgacttttttcacgaaattacagggaggagtaggtgcggaaggtatgatatatgtcgataacgattttatatgggttgctaccaatcatctagttgctatttcgcgcaaaaatccaaagcaacaaaagatactagcttcattcgacagaggtagccaatgtatttcaggagatagtgcgggtaatatatgggtaggtacctggaacggtttgtataaaatctccgccaatagggaaatgacacgttatataaattcttcagacaaaggagaattgtcggataatcagattcgatgtgtattggaagatgacttcaaacatatatgggtaggtacttttcgcggacttgattgttatgatcctacaattgataaatgggagcattatacacgttatggtgattctccaaacaccttgagccaccactccgttttatctctccacaaagatatgcaaggtaatatttgggtaggaacttattatggaggtgtaaatgtctttaatccgagtaagactagtaatcatttttactatgcagagccgttgcaggaagactgtttgagttttcctgtcgttggaaagatggcggaggatagtagtggaagattgtggatttgtacagagggaggaggattgaattgttataatgcagataccgggatatttactcggtatcaacatcggaaaggtgatgcgagtagtgtgggtagtaataatctcaagtcaatattctatcgaaaagaaaatgaacggctatatgttggtgctcatcttgggggaatatttgtgttggatctgaaatcgaataaaggacatacgcttcataatatagtaggtgatcccacatcattaccgcatgagatagtgaacgatattcaagagtataaggatgggcttgctttattaacacagggaggggttgcttttatggatccggtgactgagaaattttcaccactctcgaatgatgtaaatgtccggaagctattgaataaaagatatgcttttgaaacgttcctgattgatagtcgacaacgtatgtggttggcatcggttaatggaggtgttatttgcgtggatttgccttcatcaaaaataactgagtatgcaatggatactaataatccttcttcaataggacgatttaaagttgtccatatttttgaggacagtagaggaagtgtattcttttgtacgataggatcgggtatatatgaatatcaagaaggggagcaatcatttaagtcatacagtacttcgaatcaatgtctgccgagtgattattgttattatatctgtgaatctgttgaagatcatcgtttatttattcttcatggaaaaggactttctatttttaatagagagaaaggagaagttgaaaatacctatcacctgtttaatcagacttatagtcagggatctgctttgtatctagataagaatggaactctttttattagcggtactaatggcttggctttattccagaagcaatctttatatgctttaccttccaagagtcttttgaattttgataaattgtttattttcaatgaagaaatttgtcctaatgaccagtctggtattttgactgatatactggcgaagacatcggatatttatttaagctataaacaaaataatataactgttgaatttgcatcctttaattataataatgatcgtaaccgtttatttgagtatcgtttagaaggatttgataaggcttgggctcaaaccactggtacaacaataacttatacgaatttacctcctggtgaatatatacttagagcccgtccattagctggtaaagaaaatctggatgaggaagttcatttgaatatacatgtttctgctcctttttatgccactgtctgggcctattttttctatcttctatgtttgctaggggtgatgattgcatttattcgtttcaaaactcgtcaggctgctttaaagtcctctttggagtttgaaagaaaggaaaaagagaggattgaagaactgaatcaggtaaaattacgtttctttacgaatatctctcatgaattccgtaccccattaacactcattcttggacagattgaggtattgatgcagatggatttgggcacaactatttataaccgtatccttcgcatttataaaaatgcatggcatatgcggaatctgatatcagaattgcttgattttcgtaaacaggaacaaggttatttgaaacttaaggttgaagaacagaatctggtcacatttacgcgacagatttatatgtgtttctatgagtatgcacaaaaaaaagagattacgtatcgttttgataatgtagaagaaacaatttctgtctggtttgattcaaaacaattacagaaagttatttttaatttattgtcgaatgcttttaaatacacacccaataaaggaagtataagggtagaggtaagaatgcttgcttctcaagcgattgtgtcggtatgtgatacaggagtcggcattccggaagaacatatttcaaagatttttgagagattttatcaaacagataattcttcttcgttcacattaggaacgggcataggattggcattggctaaaggaataatgaatatgcatcatggaaagattgatgtagaaagtactgtgggaaaaggtactaaattcacgttatctcttcctttgggaaatcgtcattttagtgatgaagaaatggctactgtagaaagtagagagtcagtaattatttccgaggcggttcctatgcttccctttgaacaaataatggatgtggaagaagaaaaaacgaaagtacaagagaatattaaggaagaagataaacccattattcttttggtagatgataatgaagaattgttgtctatgctggaagatttgtttttgccgatatataaggtatatattgcacatgatggacgtgaaggactggaaatggcacgacaaattcagccggacttgattataagtgatgtgatgatgcctgaaatgtctggtaaagaattatgttataagattaaaaccaatgtggaactttctcatatttctgtgattttattaacggctcagacttctgttgagtatgttgtggaggggttaatgtttggtgcagatgattatgtaacgaaaccatttaatgtaaaagtattgattgctcgttgtaataatctgattaaaaataaaaaacgtttgatagcacattatgcaggtaagaccattacggagtctccggtgacagaagctataaatgaaagagataaggaattattagcgaaatgtgtgaatattattaaggagaactttgaaaatcctgcttttgatgttactgctcttgcttccgaactctgtgtgggacgtagtaaactatatatgcaattcaaacaaatgaccggattgactccgaatgagtttattctaaaaataaagttggatgaggcaatgtctttattgaagaaccatccggaattaaatatctcggagatttctatacggttagggttttcttctccacgttatttcagtaaatctttcaaagcattttttggggtcgctccgcaaactgtaagaagtaggaagaaagaataatgtgtttttcatctactatcaaattatacatgacatccactaatattgtacataagaggtcttattaaattggagaaaaaggctaaaatatgaccaaatcttccattttaggtgttcattttttccatgtggattcatacgtctactttttgtaatatttgtatttataggtattgtgtttctcctctacttttacatcgctttaatttagttttagtacataaaatcaaaaagttaattaaacaagtatgaagggcacaaaaaaatatggaaataaaatttttataattactgaaaatcagaccaatgcattaagagaagaaattaatatggctgattataaaaaaaacggtaatagatgtggcggctatgaccgatgaaatatgagaagatttcaagcaatcaaagacttctaattatactcattataatataacttatcacatgaaaagcaaattaataacattattcttactattagttactattggttcgataacctccgctcagggaattaaagaagaaatctctttaaaatatggagcaacgaatgaggggaagcgacaggatcctgcaatgcaaaaattccgggataatcgtttgggagcctttattcattggggattgtatgccattcctgggggtgaatggaacgggaaaatgtacggtggggctgctgaatggttgaagagttgggcaaaagtacctgctgatgaatggctgaaactgatggatcaatggaatcctaccaaatttgatgcaaagaagtgggcaagaatggctaaagagatgggagctaagtatgtaaagataacaacgaagcatcatgaaggtttctgtttgtggccgagtaaatatactcaatatacggtagcgaatactccttataaaaaagacttgttgggcgaaatggtaaaagcctacaacgatgaaggtattgatgtacatttctatttttcagtgatggattggagccatccggattatcgttacagtataaaatctgaagaagatagtattgcgttcagccgttttctggagtttacagacaatcaattgaaagaactggccacacgttatcctacagtgaaagatttctggtttgatggtacatgggatgcaagtattaagaagaatggttggtggacagctcatgtggaacaaatgctgaaggagatgcttccgggggttactattaatagccgtctgcgtgccgatgataaaggaaaacgtcatttcgatagtaatggtcgtttgatgggagattatgaatcaggttacgaacgtcgtttacccgatccagtaaaagaccttaaggttacacaatgggattgggaggcttgtatgactgtacccgaaaaccaatggggatatcataaagactggtcattgagttatgtcaaaactccgattgaagtacttgatcgtattgtacatgctgtttctatgggaggaaatatggttgtaaactttggtcctcaagcagatggagattttcgtccggaagaaaaagctttggcgactgctatcggcaaatggatgagtcgttatggaaaggccgtttatgcctgtgattatgccggattcgacaagcaggattggggatattacacacgcggtaaaaatggtgaagtgtatatggtggtattcaatcaaccatatagtgaacgtttgatagtaaaaaccccgaaaggaatttcagttgaaaaagcttctttattagatactaacgaagatatcaaagttgttgaaacagctcgtaacgaatataatgtatctgttcccaagaagaatccgggtgaaccttatgttattcagcttaaggtgcgtgcagctaaaggaacaaaaggtatttatcgggatgctttaacataaatcaaaagaggattgtaatatgaagttcaaatttacattcgttttgttagtattgatcgggcagtttttctctctcactgcccgggaagtgacctctttcaatgaaggttggttattcaaacgcggtcctttttcggaagacccagtaaaagttgttgctcaatgggaggggaaatgggaaactgtaaatctgcctcacacatggaatgctaaagatatgcaggtaaaggctgcttctttttatgaaggagttggctattacaagaaaaaacaattctttaatgaagaattgaaagggaagcgtgtgtttcttcgatttgaaggtgtgggcgcaaacaccgaggtatatgttaacagtaagcttgtaggaacccataaaggaggttatagtgcttttgcttttgagataggaacagctttgaaatttggagctgagaatgaaatcatggtaaaagctgataatactgcacgaccggatgttattccggtgaatcatagccttttcggagtgtatggaggtatttatcgcccggtatggctaattgttactgagcaaaataatataacagttaccgattgtgcttctccaggtgtttatattactcagaaaaatgtttcgaaacgttctgcagatattactgtaaaagtaaaattagacaatggcagccttactcctgcgaatttagtacttgaaaatactctctatacccaagaaggaaagagagttgcttcacatcgccttcctttggaattaactcctcaaggaacgcaaacttatttttcaacttttaaattgaacaaacctcatctttggcaaggacgtaaagatccttatttgtataaagtcgtttcacgtttggtagcagaaggaagggtcattgatgaagttatccagcttttgggtgttcgtaagtttgaggttgttgccggtaaaggattttatttgaatgatgagaaatatccgatgtatggtgtaacccgtcatcaggattggtggggattaggaagtgctttgactaataaagaacatgattttgatttagcacagataatggacgtaggagccacaactgtccgttttgcccattatcaacaatcagattatctctattctcgttgtgattctttgggattggtcatttgggctgaaatcccttttgtgaatcgtgtgacaggctacgaagcggaaaacgcgcagtctcagcttcgtgagttgattcgtcagagttttaatcacccttctatctatgtttgggggttgcataatgaggtatatcaacctcacgaatatacagccgggctgacgcaagcacttcataatcttgccaagacagaggacccggatcgttatactgtagctgtcaatggtttcggacatgctgaacatgcagtgaatcagaatacagatattcaggggatgaaccgctatttcggatggtatgagaagaagctacaagatattgaaccatgggtgaaaggattggaagaaaagtacccgtggcaaaagctgatgttgacagaatatggtgcggatgccaatttggaacatcagactgaatatctcggtgatgcattgaattggggaaaacctttttatccggaaacattccagactaaaacgcatgaatatcaatggagtgttatttcgaaacatccttatatcattgcttcttatctatggaatatgtttgattttgctgtgccgatgtggagtcggggtggtgtacctgctcgtaacttgaaaggcttgatgacttttgaccggaaaatcaagaaggattcttattattggtataaagccaactggagcaaggagcctgtattgtatttgacgcagcgccgaaatgcggatcgtgagcggaaacagacctctgtgacagtttattctaatattggtactcctatagtatatcttaatggtaaagaattgactggtattcgcaagggatatactgatgtacattatgtttttgataatgtaacactggaacaaggtaaaaatgtaataagaaccgttgcaacacataacggaaaagaatacacggacgaaattgaatggaattatacaggagaaaagaaacgcaatgctgactcgcgtgagaataagaacgaacatgctggttggtaattgcttgtttagaatatataaaacaatattgttgaatctttaaatatgaaagcctatgtgaaactatgatcttacatcaattcgaaaaacacttagaattaaaaatgttatggaataaaaaacatctaaattacttatggaatacaagaaattttatttattaattatcgtatgcctcttttctataggaatattcgctcagagcggtacagagaagattagcatttcgtttagtaaaatacctttaaaagaagctatggcaagagtagagaaggcttcggggtatttgttctcttatgatgcgactgaaataaatgcagaacaattggtaagtctgaactgcaagaatgaagaagtgcgtctggcgcttcgtaaaatgtttgaaccgactaatattacgttcaaatttcagaataaacaaatagtattgtcgctttcttctaaagaaacgttgagttctaagaaaggagcgaccaaaactgtcactggtaccgtttccgatggagcaggggagcctattattggtgccacagtaatagtgaaaggcactattaacggtgtattaaccgatatggatggtaaatacactattaaagcaagagaaggtgaagttttggaattccgctatattggttataatagtgttgaacagaaagtaaaggataaaagtgttatcaacattgctatggcggaatcgaatgtaaatctggatgacgttgttgttattggttacggttcacaaaagaaagaaagtgtagtatcttctgtgaatacaatgaaacctgcagagattgctataccaacgcgtagtttatcaaatacgattgctggtcaggttgctggtgtgattgccattcaacgttctggagaaccgggaaatgatgatgccgatttttggattcgtggtcaaagttcatacgcaggtggtacgagtccattggtgttggtggatggtgttcctcgtagcatgaatgatcttgacacagatgaaattgagacatttactgtcttgaaagatgctgctgctactgctgtatatggttctgaaggtgctaatggtgtagttttgattacaacaaaacgtgggcgtgcacaaaaaactattatcagcttcaacgcacaatatagtattgctactcctacccgtatgccggagttgatgaactcttgggattatttatcaatgtggaatgaagcgtcttggaatgatgcgggtaatcctaattgggataattatgtgcaaaatagcgctccatacagtgcagaagcgttggcaaggtatcgggatggagttgatccggatttatacccgaattctatttggaccgacttattatctaataacacgcagaatcaacgttatacagtgaatctgcgaggaggttcggaaaaaactaagttctttgtatcaggagcttattataaggaaaatggtatgtttaaatcgaatccattggatgactacaatgccaatatcggattggaacgttataatttgcgctccaatgtagatatggatattactccgacgaccaaactttccgttgatatgagtggacaatacagaactcaaaataaccccggaaattcttctgaccagatttttaaacatatcatacttttcccgactcatttggtaccttttacatggtcggacgggactgctgcagtttgtgatacagatgcggatggacgttataatccttataatttacttaattattccggttattctaaaaaatggtctgtagcaatgcaaactaaggcaactttgagacaaaaactcgacttcataacgaaaggactgtctgttcaaggtagtataagttttgatgcagatttcagttctactttaaaacgttcggcgagtccggataaatatactgttaccggtagagatgaaaacggtttacttatcaaaaaactattttcagaaggtagtccgcttggggaagcttctgttagcacaagcagtggtactaaaaaattatatattgaagcgcagttgaactacgaacgtacttttgccaagaaacacgctgttacaggaacttttgtatacaatcaaaaggaaactcaataccaaggttctagaaaatcttctggagcggaagaagtaggcgggttaaaactgttgccttatcgtaaacagaatattgtaatgcgtggtacttatgcttatgataatcgttatgtattagaagctagttttggtgcaacgggtagtgaaaacttcgctcctggtaatcgttggggtattttcccggcagtaggtgccgcttggaatgtacatgctgagaaatttatgcaaaaggagaatatcttggatattcttagcaaattacgtttgagagcttcttacggtcttacaggaaatgataatacaggaagtgaccgttttgtatatagagaactattgactgatagcggtagtcaaaatgtcggcttgaatcccggtactaatggtggtcctactaatgatatgggaagaatttatgaaaacacatttgctgctccatatattagttgggaaatagagaagaaaagcaatttcggtattgacatgggattattccgtggtcgtgttgatattactgctgattattttcataatcgacgggaagatattttgattcagcgtgtaactattcctacggctactggtttccgtcaaaatccatggcagaattttggtgtcacgactaatgaaggttttgatgctagtattacagttaaacataatatcggaaaagactgggtgctttcagccagaggtaatgtaacatacgctgttaacaagattatagaaaaggatgagattccacaggcttatccatggcttgctcaaactggtacttctatcgggacaaataaaatatatgtagcggaaggattatttaccaatcaggattttattattactgaaaaatcagatggtagctataattataaattaaaagatggaattgctacttatgctgctgatgtgaagcctggtgatattaaatataaagacttgaatggtgatggtactattgacgataatgaccagacttattatagcggcatttatccaaataatccgcaacttgtttatggcttcggactgaatgtacaatataaaggtatttatgctggtgtatttttccagggagtaggtaaaacatccgttaacttgaaagctaacactagttattttgtcccatttgctaatggaaaagaccagtcttctgcacgtgtacaggctgccgaccattggactgcaagtgatcccaataatatgaacgttttatatcctcgtttacacaccaatgagtatagtaataatacgctgaatagtacatggtggtacagagatgggagttttctccgtctgaaaaatgtcgaattgggttatcagtttgataaaaaattggtgcagagatggaaaatgcagaacctccgtatttatgtgcagggaagtaatcttgctgtgtgggatcacgttaaaatgtgggatccggaaattggaaacagcggtgcaagatatccgattaacgcgacctggactttcggtcttgatgtgactttttaaccaataatcaattataagaataattaattatgaatattataaaaacagtatgtacagcaactgtcgtattaatgacaggtatgttgacctcttgctcagattatttggatgtttctaaagaacttgctcaaaatctagacaaggaagaagttttttccaaagctaaatatattaaacaatggtatggagaaatctatcaaacttgtccgaactattcggaagcgggtttggatgtacaaaattcaaatggaaccgttaatgcgcaagctatctattcaggagaaatcgtttgtgctcatcctaatgtgttgaaatttggacagaatacttttactcctagtagtaccactcacaaccgttggtggaattgctataaacctcaaatccgcaactacgcgcctaatatgatacagaagcgaaaagaatctgcatcgttagtaaaaagggggcacagtgcatcgaatgtcaccataaagacatataaatgccccttaccccaccatgcgacttgaggcaatacgcaaaatcacgactataagttgtcggtgttatccaaagtcattctggaacacattggcataagcattgttgcatgaatagatattcagcacatacttccttgatgtcctgacccatttggctggcacagagatgaacttaaagacaaacgtcttgatgcggcttgttgctttgagtccgaacctcttcacgtcaagcctcgccatgatgaatttatagaagttgcgtatgagtgccataagcagaagaaacaccgtgttttctcccataaaggattttggaagcctgttccagccgaatccgttattcatatcatcgaagatgcgttccttccctccacggaggttatagaattcgacaatctctttctcggaagactcgtagtcatttgtaaggatgcagcggtaggtgtattctccttcccacaggtcgagttcgccgtctatccgcttctgtctttgaatcacaagacggtatgccttccctttccatttctcgatgagaatggaggccagctcaaactcaatgccgcccaattccactttcttccaacctctgagggcaaagatgtcattgtagagcgaactgcatcggttagcacggatatagaaggtcttgcagtgtttagcaatctcttccactatctcttcagaacacgagccgcaatcagctctgaaacggttgataataagcttgttttgttcaaacctttcaaagaacctcttcagcgtgtccttctggtggaaacggacatttgtgttgccgtcgctgttctcaatgccgacaatcaagttgccaataaccgccacgccagggcgataaccaaggaacttcttgtatgtaggcttcgcatcaaacttctcagcctctatgaactggtggtcgaagtcaacgtcatacccctcgccctctttcagctgccctgtggacaataggcaattgaggagcagtgtattcagcttgtctgccgtgttgaagtcgtaggtcttgccagtgtcggatgtgtaggaaatgttatcctgggtcagttcctttatggctctaagaatcgtgtcggcactgcatgtgcgaagtgtcggatgaagcgaaaggtggtacatcagatgagtggtgacatcctcgatgcatgagccgccacaaaaataaacgctcataagcgaacggatgatttcgctgtattgataaccatacagcctgcatctcataccgagggttgagtcgattacagatgagagtctggagtcaaattgctccattattgaaaatattcctccaaaaggagtgagtttctcggatttaattgctacctttgccatgtctgtcgggtttgatacatattttgatttgcaacactaagataggtgaaaaatctgacatggcaaattcctgagcaactttttgttgctcaggtacttaaaaagttatatttgtaatagtgttgcggaattaaggataaacaaattcgccaggcaatgatctttttggatatggcacctgaaagcataggtgatccgatcaatgctgatggttatatttcagtagaagagatgcgtcgttataaggcggatgttacttatctgcttgcttacaactatttcttgttatttgaattctatggtcctacacctattattcccgagactgctgatccttcggatgagaaccttgattatgcacgtgcatctgttgacgaaatggtaggacatattgatcagttattagaatctgttataaatggtgaatataaagatgatctgcctgaaacgataaaaactggaacaggggatgatactagtcatgacaatagtatgtacaatcttcgtgaaatcctgcgtcctacaaaagcggctgctttagcattacgtgcacgtttgtgggtatatgcagcttctcctctgtttaatggaggctataaagaagcgttgagtttgacaaatcatgatggaaagcgtcttttccccgatcgtgatgataacaaatggcaaactgccaagacgcatcttgaagctttgttgagatttgccgaagcacatggtatggatctttattattccaaagagagagatcctcatacatcaatatatgaattgttccaatattataacgatgagattctttgggctaacggaaataacgattataatgatggcgtcactgctaaaatggaagctcgcacaatccccggagatattcctagtgctatgggtaatgtcggtttttatcagaatattgtcgatttgttctttacggatagtggattggatatcagtgaagaccctgattataatgaaaacggattcacaaattgggtaaatgtttgtaataataaacaacatgtagacaagcacatcttcaatatgtatgttaatcgcgagcctcgtttttatgctgatgttacatacgaaggaaagagctggcatatacaaagaagcagttactcagattggggagcttattttagtaaaggtggtgcaggctatagagataacactatgcatgcacgtgcaggctatttactttataagtttaataaccgtacattactgaaagaaggatcgaatcctacggactggggacgtccttggatctatttccgtttagcagatttctacttgtactatgcagaagtatgtaatgagataaatccgaacgatgaaaatataattaagtatctggatttagtacgtgaacgtgctggtattcctgggtataaggaactggctacgaagtctgcaccttatgggaagaatattataggaaatcaggatttacagcgtgaagctatctatcgtgaacgtattattgaaatgttgggagaaggaaactattattttgacatgcatagatggatgcgtgctggatggtcacaagatgaggctaccggtgaatggatcaaagataatgaggataaattgttaatacgttatggtatggacatcaataaagcagcagtaaaaacatacaatagtgctaaaaacactgcaattgaattttatgataaaattggtgaagattcatactacaaccgtattgtggtagatagatatccatggtcaaaagctatgttgctttatcctgtaccttacaatgaaatgcagaagagtaaattgacggttcaaaatccgttatggaattaatcgtatgacagtttgataaacaaaggcagagaccgggctcttttgttccgactttgcctttgctttacatgttattcatactggactaccttaaatataaactcttgcataaaataagttaacgtaaaatatcgaaatgaggtcatgaaaaatacaaaaatacctatcataaaaggccattggtgtaagttgaaggtaatcttattatctttgctttatccttgtttaggctattcatgtagtgacagtgcaagttcggctattcctgatgattggattacaatttctacagagtccgtgagttttccttatgagggagggacagaaaaacgtgagttcgtattggggcaaggattggacataaaccagatagcatcaactttaagtaataagggagaagattggctgaccgcccttgttgaaaatggtaaaatgacgattgtatgcgaacgttcttttgcagagagagtcagaagttctgtattgacattgatgtatgatgacaatcataaatgtaatatcacaatttctcaagaagcagctcctagttctgctgacaaattaataaaagtaattggcggcgaggccacttctgaggaaacgcaaggtaaagatacagaccagaatccgttgaccttaaagatgtcctatgatggaaataagaaaacatattttaattccgcgtttgggcaggtctcatatccattttctatcagatatgaactggagaaggggcatacactgaatagtatcgtttatactccacgtactgactccggaaacaaatggggctcattcgatcaatttacagtggaagtttcgacagccgataaaccggatgattttgtgaaaataggtgattatgcaagaggtaatggggtgcatacgccatttaccataaagttgtcatcacctgtggaagatgctaaatttgttcgttttaccataactaaagcctatgaggatagagtaagctgtgctgagatggaattttatgaagctagtagtaataaatttgatccagctacaatttttgctgataatatgggtttacagcttaaagctggcgtgacagaaaagcagattaagcaaatccctaatgaatatttgaaagaattgggacttgctttgctaagtggaaactatgagtctgcttatcgattggcggattaccgtccttaccagaatccagcagtaatggctacggctaataagacatctaaatacagcctgagagataatccgactggaatttatgcaaaagcgggtgagaccttggctatatttgtcgatgatatttatgagggtggtagaatttcgatgcttattcaagatctgaacggtggttacaacaattcgaaaacctacgagttgtcggaaggatataatgagataacagtagaggtcggtggtttaatttatattttgaatcatgtaaatgatgacattcctctccggcttgaagatgctgataatgatcagaaaaggaatattgaggcaaagacggtaaaagtgcattttgcgaatggaaaagtaaacggttattttgatattcagaaaaacaaggaaagtgattgggctcagattcgcgacaatgcaaagtatcaggaaatagatatcttgggagaatactcacatttgacgtggagaatatctgacttcaaaaagtacaatacagagataacgaagactattgaaaatttggatcgtctggtatatttggaggaagagtttatgggacttgttaaatatggtaagatgttcaataaccggatgcatttttctattgactacaaggcaaagagcccgaacgcatcagattatcgtacagtttataatgctagtgattactatgcggaaccgttctgtaaaccagaaaattttcctactcgttgttggggacctgcgcatgaagtaggtcattgcaatcagacacgtccggggttgaaatgggccggtttgactgaagttaccaataacattatgtcgctttttatacagacatcattcggtcgtccttgcaagttgttggttgacggatgtacgttgaaagatgagaacgatcagacattgggaacgtataataatatttatcaaggcgctacatcattgatagtggatggtaaacgtcctcattgtcttcctggtattgcaaatattactcgtgaaactcaacttgtaccattttggcagctcaaactgtacatgatagatgtattaggaaaaactgatttttatcataaattatatgaatattttcgtactcatgagagtccgagtgacaagggtgagaatcaaggtatgaaccagctggattttgtacgtcaggtatgtgacatttcaggattgaatatgctcgatttctttgagaagtggggattcttatatccggttaaaactacactgaatgattatggaaataaagcattcgaaatcacagaagaacagattaggctgttgaaggaggaaattaacggaagggggtatgaaatgccacatccaaacgttcatcagataacggaaatcaatttggatgattataaatgattgaataataaatgatctataataattaaaatttaagaatatgaagaatataaataatatattatcagtgatattattgttgtttgcaggattttttgttgctgcctgtgatgacgaagaaacagttgtcgttccagataactggataactgtgtcaacagatccaatgactattggttatgaaggaggaagtttgacatgcgactatacgttggccaaagggcttgatgcgagtgtggtatatattataaatcatgaaagttggtgcttaggctatatcaaggatagtaagataatgatagatgtagatttgtcggagaatataaatgggcgtacagctaagatgtctttgatttatgatgaaagtcatcaagtggaacttgttgtagaacaagggaaggctccgacggtactggttgaaagtattgataaaagtgctatgccagaatctattaatataaatgagacgttggatctgaatacggtagtaaaagtattaccaactaatgcaagttatcaaaacctggcctttactcttgcagaaggtagtgaagcattcgttgaactttcagagtcaggtgtggttaaaggagttgctgcaggtgaagcaaaaattaatgttgctgcagttgatgagagtggagtaacggatgttataacattgaatatcattggtaatattaggttaaatcgtgattcttggacagtttctacttccattacttataaaaatggaaataattatgtgacagatggaactacgggtaatcctgaacatctttttgataatcctcaaatccgcaactacgcgcctaatatgatacagaagcgaaaagaatctgcatcgttagtaaaaagggggcacagtgcatcgaatgtcaccataaagacatataaatgccccttaccccaccatgcgacttgaggcaatacgcaaaatcacgactataagttgtcggtgttatccaaagtcattctggaacacattggcataagcattgttgcatgaatagatattcagcacatacttccttgatgtcctgacccatttggctggcacagagatgaacttaaagacaaacgtcttgatgcggcttgttgctttgagtccgaacctcttcacgtcaagcctcgccatgatgaatttatagaagttgcgtatgagtgccataagcagaagaaacaccgtgttttctcccataaaggattttggaagcctgttccagccgaatccgttattcatatcatcgaagatgcgttccttccctccacggaggttatagaattcgacaatctctttctcggaagactcgtagtcatttgtaaggatgcagcggtaggtgtattctccttcccacaggtcgagttcgccgtctatccgcttctgtctttgaatcacaagacggtatgccttccctttccatttctcgatgagaatggaggccagctcaaactcaatgccgcccaattccactttcttccaacctctgagggcaaagatgtcattgtagagcgaactgcatcggttagcacggatatagaaggtcttgcagtgtttagcaatctcttccactatctcttcagaacacgagccgcaatcagctctgaaacggttgataataagcttgttttgttcaaacctttcaaagaacctcttcagcgtgtccttctggtggaaacggacatttgtgttgccgtcgctgttctcaatgccgacaatcaagttgccaataaccgccacgccagggcgataaccaaggaacttcttgtatgtaggcttcgcatcaaacttctcagcctctatgaactggtggtcgaagtcaacgtcatacccctcgccctctttcagctgccctgtggacaataggcaattgaggagcagtgtattcagcttgtctgccgtgttgaagtcgtaggtcttgccagtgtcggatgtgtaggaaatgttatcctgggtcagttcctttatggctctaagaatcgtgtcggcactgcatgtgcgaagtgtcggatgaagcgaaaggtggtacatcagatgagtggtgacatcctcgatgcatgagccgccacaaaaataaacgctcataagcgaacggatgatttcgctgtattgataaccatacagcctgcatctcataccgagggttgagtcgattacagatgagagtctggagtcaaattgctccattattgaaaatattcctccaaaaggagtgagtttctcggatttaattgctacctttgccatgtctgtcgggtttgatacatattttgatttgcaacactaagataggtgaaaaatctgacatggcaaattcctgagcaactttttgttgctcaggtacttaaaaagttatatttgtaatagtgttgcggaattaaggataataaaacgacgacttatctctcattggtgaaacctggtaagagttatggaagcgactatacggctgcgggtataaacgaacctctttattttgttgttgatatgggagcggaacaaacttttaattattttacatggatgcatagatctactaatgggtacaattatttgcgagcatggggaatctcgatgtacggaagcaatgacggtaagaattttattgaaataaaatccgatattgatataccttatgaaaataatacggatgagattgtaattgctattccggaatctacttatagatatgttaaagtacagtttgtgaagtggagtgatctagtaaccggttcaactagtggtggaacattgcaggttgccgaatttggacttggtcgtgaactctaatccgacagtttgaaataggtccttatacacagagggcactttctaaagtagttgcttaacaggcttcatactttttgaagtgctctctttttatttctttataagagtaaagtaataatatcattaattattctatgtagaaaataaattgttgatatatgatgttttaatacaagactgtatgagaaaaaagtttattaaatccattcttattgtatttgtattgataacccagttatctttattgaaggcacagacgcaagaaatagatctgtctggtcaatggggatttcaaactgacctgatggattttcgacgcggttctttggatattcgttatatgcatcgcttgcaggagagcatccttctaccagggattacggatgactataaaattggttataaatctccttatcgtcacattgaccgtttgactcgtgtgtatgagtatatggggccggcttggtatcaacgtgaaataactattccaaaagagtggaaaggcaaacgtatttttatatctttcgaacgcgtacactggttgagttctatttatgtagacacaaaggaagtcagtaaaatagactatatcagtgttccccacaatcacgaactgacagatttcgtgaaaccgggtaagacgcatcttattactgtatgcgttgataatcgttatcaatacaatacccataaatgggatcatgctcattcggaatatactcaaataaactggaatgggattttgggggaaatgaaactggtagctcttgatcctgtatatattgaggatatgcaactgtatccgaatgtatcggagcattcagtcaaagtcagggtgaagatattgaatcacactcataaactcgttacagggagggcattttttacaatttccggcgaacaatataagcagactagagagacaatggtttctgggaatgattcagtattttacgtagaagatatcatagcgttaggtaaagatattcggttgtgggatgagtttactcctaatctctatacgttgcaatgtgatctggcaacgactacgggtagtacaaactatcaacatacacagtccgctaccttcggaatgcgtgaaataaaggcagatagagacaatattctgattaatggtcatcgggtacatttgcgtggaacagtagaaaatgcagtatttcctaaaacaggttatgctccagtggatgatgcttcgtgggaacgtatattaacgattctgaaagattatgggatgaaccatatgcgtttccattcctggtgtccacctgctgcggcatttcggacagcggataaactaggaatttatctggaagtggaaatgccgatgtggggaaaggatgccgaaccggatgagaaacgttatgactttttccgtcgtgaacaaaaagctatcttgaaagaatatggtaatcacccctcttttgttctttactgtaatggtaatgagataaccggtaattttgattttatagaagaactaacccattatgggagggtcagtgacaaacgcaggctatttagtggttcgacagcccgtacacgtgtgaagtctgaccaattttacatcactcatcaaacgcctaaaggacatatggctatatacgaaggacggccatatactgattgggataaaaataaagaattgggcattgatgtgcctgtgatctctcatgagtcgggacagcgttgcatatatcctaacttcaaggagattccaaattttaccggtccggttcaagctcgaaactttgaagttttccgtgaatcattggcggcaaacggtatgttggatcaagcagatgatttcttccgtgtatcaggggctcagactgtactggaatataaagatgttattgaagctgaacttcgtacttctcttaaatccggttttcaacttctggccttgaatgattttacaggacagggatatgctccggttggtattctcgacccgttttgggagtctaaaggtttgattactcctgaaaaattccgtgagttttgtgcacccactgttgctttactacgttttcctaaacgagcctattattgtgatgaaacttttgaagggaaggcagaagtgtataattatagtccctctatcttgaaaagtgcaaaagctaagtggtggattaccgatgcttccggcagagttctgaaatccggtagactgaagacacaaagaataggaaactatggtgtctttccacttggaacgtttcagtatatgttgaattcggtgactgctccgcagaaattaaccatacatctgtccgttggtgacaaagttcataatagttgggatatatgggtctatccccatcataaagatttgatgcagacaacgcctgatgtattatatacaacaacctatgatgcgaaagcgaaacaatatctccaagaagggaaaaaagttgttctttgtccgaagccgaacaaagtgaaagggcgtaagtctgtatttcacaatcatttttggaatccgattatgttcaaatgggcaccaacgacactgggttgtcttattcatgccgatcagcccatgtttgcagacttcatcactgaaaagcatcttgattggcagtggtgggatattctgacgaatgcaaaagtgattgatatgacggatactccgcaagaacttcgtccgtttatccaggtaatagatagctatgaaaccaatcagaaactagggattggctttgaggctagggtaaacaatggtaaactgttggtattggctgttgatactcggaaagacctggataaacgtcctgctactcaacaattgctgaagagtattgatcaatatgtgaagagtggccaatttgctccccgagcaactgtaaaagaagagtttattcaatcctttttaataaaatagttatgcgaagagaattatttatatgttgtttattttgcctgtccttactgactttatctgcacaggagattccgatgcaggaagtcgcggctttagagcaagtgtatggtgatgttcaggaatcagagggattgctgccgatgaatgaattgggcattgagttcggctatgctttatatgaggcggagattactgtggagggtgtggctccaatattggcggtagagaatattcgggactatgcctcagtctatgttgatggaagattacaaggctggatcactgataatcagaagaatattaagctgactgtttctacgggtacacatcatctgcaactttatgcagagaatatagggcgtattacttatggacctgagatattggacaattccaagggacttttcgggagtatcactttagaagatgttgaaatagagaactggaaaatgacacctctcctgatacgtgactgtgacgtggaagaactccagtttaccccttgtcaaacaaaacagtctccttgcttctatcgcggtacttttgagatagaaactccgacagatatctttttagatacttcgggctggggaatgggagaagtctggataaacgggcagtatataggttctttttgggagaatatttctcagcggactattccggtaccagctgctatactagctaaaggtattaaccgggtagtcgtatttgaattgaagaataattgtaggcaggtggtacgtctatctgagaaagctatatttgattaataaaataagagtataatagaaagaaaatttaattattaggtttgtgactgttgttagttgcatatagcaactgatttttagcaactgattcacattattcattaatttgtaaaatatatgagaaatctaactacaacaagtagatggaagaaatcacttttgtttgtattggggctatctgtgatgttacctccttcattaatacaggctaggttatataataatgcgatagagacagaagtgttgtctcccattgtcggtgccaaaaagataaaccccaccaccgttgaaatactattccccaatagccagcgtatgacactggacttctacggagaaaatatcttccgtgtatttcaggacaactcaggaagcgtgatccgggatcctcaagcaaagccggcggcgcagatattagtcgacaatcccagaaaggcggtttcaaagctggatttggaagagaatacagattttgttttcctcactaccggaaagataaaagtccggctggataaaaagacatccttgcttaaggtaactaatctggcaaccaacactgttgtagtggaagaactggaagcgcctctttttgagaaagggaaagtaaccctgacattgaaagagaatccgcaggaatacttctacggtggcggtgttcagaacggtcggttctcccataagggtaaggtgatttctatcgagaaccagaacagttggacagacgggggagtcgcctctcctaccccttactactggtctaccaacggctacggtatgatgtggtataccttcaaaaaagggaagtacgacttcggagcatccgaagagggaaaggtgaaattgtctcacgaatcagattatctggatgtgttctacatgattaatgacggtgcggtggctctgttgaatgacttctaccaactgacaggaaatcccgtgttgttacctaaattcggtttctatcagggacatctgaacgcttataaccgtgactattggacagaaaacgagaaaggcattctgtttgaagacggaaagcgatataaagagagccagaaggacaatggcggaatcaaagaatcgttgaacggcgagaagaacaattatcagttctctgcacgtgcggtaatcgaccgttataagaaccatgacatgccgttgggctggctgcttccgaacgacggctatggagccggctacggacagacggaaacattggacggtaatatacaaaatctgaaaagtctgggtgattatgcccgtcagaacggagtggaaatcggcctgtggacacagtctgacctgcaccctaaggaaggagtgagcgctttgctgcagagagatattgtgaaagaagtaagggatgccggagtacgcgtgttgaaaacggatgtagcctgggtcggtgccggctattctttcggattgaacggagtagccgacgtcggacatataatgccttactacggaagtgacgccagaccgtttatcatctcccttgacggctgggcgggcacacagcgctatgcgggcatctggtcgggtgaccagacgggaggcgtatgggaatatatccgtttccacatcccgacctatatcggctcgggactgtccggtcagccgaatatcacttctgacatggacggtattttcggtggcaggaatgtgcaggtgaatacccgtgatttccaatggaaaacgtttactccaatggaactgaacatggacggttggggagcgaatgagaaatacccgcacgccttgggagaaccggcaacctccattaaccgctggtatctgaaactgaaatcggaactgatgccttatgcttacagtatcgctaaggaagccgtagacggtatgccgatgataagagcgatgtttctggaatacccgaatgcctatactcaaggtacggctacacagtaccaatatctgtacgggccttattttctggttgctcctatctatcaggcaaccaaagctgacgagcagggaaatgatatccgtaacggcatttacttgcccgaaggtgtatggattgattattttacgggcgaaaaatacgacgggaaccgcatactcaacaattttgcagctcctctctggaagcttcccgtattcgtgaagaacggagcgattattccgctgacgaatcctaataataatgtaaatgagattgataaaggaatccgtatctatgagctttacccgtacggcaagagttcttttaccgaatatgatgacgacggtgtatccgaagaatacaaacggggtaaaggagtaacaaccaatatcgagtccgaggttggcagcaagaatgacgttactgtgaccattcatccggcaaagggtgattttatgggctttgtgaaagaaaaggttacagagttcagaatcaatgtcacttctctgccgaaaaaagtgacggcacaagttggaaagaaaaaagtgaaactgacaaaggccgcttcgaaagatgaatttgcaaagggtgaaaacgtcttcttctacgatgaggctcccgatctgaatcggtttgcgactaagggaagcgagtttgaaaagaccgttatcaccaagaacccgcaacttttggtgaaactgggtgccaccgatattacggccaatactacgacattgcgcattgagggattccgttttgttcccgaagaccgctatcggatcacttccggaactctggcagctcctgttgcccgggttactgccgacaatacggaagcctataccttgaaaccgacatgggataaagtggccaatgccgatttctatgagattgactttatgaatatgctatatactacgataaaggatacggaactactgtttggagacctgactcccgaaacgccctactcatttaaaatacgtgctgtcaataaagacggagcttccgcctggacagagttcggtgctgcgaccaagtccgatccgcttgaatttgctatccgtggtatcaggggcgaatgtacggccgcttcgcaaggaagagtaggcgtgaaacgtctgttcgactttgtagagtccggagatatctggcactcgaaatacggggaaaaagccgttccgttcgaactggttatggacctggtgactgtcaaccaactggataaattccactacctgccacgtacaaacgccggtaacggaacattgctgaaaggaaccgtttcttatagtatgaacaaagaactgtggacggaagccggaacatttgaatggcagcgtgacgatgaggtgaaggtattcaatttcacccaacatcctactgcccgctatatcaaactatccgttacagaagcagtcggcaactacggctccggtaaggaaatctatgtattcaaggtgcccggaacggaaagctatcttcaaggagacattaacgccgacggtaagattgacggcaatgacctgacatcttataccaattatacaggactgagaaagggcgattccgattttgaaggatacatcagcaatggtgatatcaataagaacggtctgattgacgcttatgatatttcggtggtcgccacgcagcttgaaggcggtgttgataaccgtggtacggaaaaggtggacggtacgattgagataagcacctcgaaacaagtatatgacaaagatgagattattgaaattcaggtaaaaggtgttgatctgcgtgcagtcaacgcattcagttttgctttaccttacaatcaacaggattatgagtttgtcggcgtggagttgcaacacatgaatgcaatggagaatctgacttacgaccgtctccattccaatggttcaaaagccttgtatcctacctttgtcaatgtaggaaataagaagacgcttgaaggaaccgttgacttatttcttttgaagtttaaggcaaaacgtcaagtgaaattcggcttgaagatcattgacggcttgttagtagataagagattgaatactcgtagatcgggtgttcagtaattgggttagttagtagagttgttcaaaaagctgcttttttctttctttatggaagataagagcagcttaaacggaaaatatgactctattaagtccataaagcctggtatctttgtcttaaacaaaattatagtattatgaagaaattacttttaacccttgccctatgcatgggctatttgtgtactacagttgcgcagacatttgttaaaacagaagtgaagcagtcgatgcggcgggtggccgactggcagattgctcattacaacaaggctatttacggtgatctcaattgggtaaatgccactttctatctgggacttgtccactgggctgcaatagccgaacaggcggataaagatgattcatactacaaatggctgttgcggctggggaaccgcaattactggcaggtaaatcaacggatgtatcatgctgacgatatctgtgtctcgcagatgtatttgtatatgtatgaaaagtacaaaagaaaaagtatgcttgtcccgacacaggcacgtgccgaatgggtgattgccaatcctccttccggttcgttcgagttggactatggcgatgcaaccaccttggaacactggacttggtgtgacgcactgttcatggcacctcctgtttacatgaaactctacaatatcacgggtgacaagaagttcatccgtttcatggataaggaatataaagctacttacaattatctgtttgataaagaagacaatcttttctatcgtgaccaccgttactttacgatgaaggaggcgaatggcgcgaaagtgttctgggggcgtggcaatggctgggtactcggagggctcgttgagcttttacgtgaacttcctgccaagagcaaataccgtccgttctatcaggacttgttccaaaagctatgccgccggattgctcctttgcagaataaggacggcttctggcatgcgagtctgcttgacccggcttcttatccgtcgcccgaaacgagttgcagcggtttcttcgtgtatgcgctggcttatgggataaacgaaggacttttgccaaaagaagaattcatgcctgtggtggagaaaggctggcaagcattagtgtcggctgtgggagaagacggtaaactgggatatgtgcaacctatcggcgctgatccgaaaaaggtgactcccgatatgacagaagtctacggtccgggagctttcctgatggcagggacggaagtttaccgtatggcacaggacacttcgaggcagcatgcgaatatttcccaaagccgtatccgtgagattgctgcaatgttgcccgataaaccggaaggaataggcgtttcttataaagaccgcaccttctggaacaaagtaaaagagagtagcaaggcagaaaaactgctgacagaagaagcacctgcattgctgaaaaaggggatgcctccttttgttgactccttgtatctgcatctgaacaaaaccaatgtccgcctgccgggcgaaaatatgataaatgcccgttaccattatctgtttcggttgacattggctgaatgtatggagaataaaagacgttacattcctgctattgaaaaggctctggttgctctctgcaaccagaactcctggtcgattccggctcacgaccgcaatctgaataattatcatggaacagattattatgtcgatttggtagttgccactgccggaaacggaattgcgcagtgtgttgctatgctcgacgaccgtttgtcaccggaagtaaaggcccgcgtgcagtgtgctttccgcgagaaagtatttcgtcctgtataccgttgcctggaagagacaaagcctttctggtggtttacggttacaaataactggaactcggtttgtttggcaggtgtcacgggtgctgccctcactttgctggcggataaggaggaacgcgcttattttgttgccgcagccgagaaatataatgtatacggtatgaaaggatatgccgatgacggttattgcagcgaaggggtcggctactataattatggtttccgtgcatatatcttgctgcgtgaggaagtatgccgtgccacgcaaggcaagatagatttcttccgtgaacctaaatttgtgcatattgctcaatatggtcggaagatacagatgaatgaaggtgtatgtcctgcttattccgactgccgtatcggtttatcgcctgataagtttatcctcgattactgtgaccgtgcgcttggtatcacctctgcggaagaaaaatatattctcccttccggcaataatttctctctttatctcatagagctgttccctcatcaggtatggaaaatggaaatgacagacggcattcgtcaggcattgcaggaaggttccgattctttgcgggcgtattatgaaaaggcaggaatcttggttgcacgtcctgccaagggcagctcgtgtacgttggctgtctcggccaaagggggtaataatgccgaaaatcataaccataatgacattggctcttatgccgtcgctctaggaaagtgcactatggttggcgatcaaggcggtcctttctcttatccgggtgattattttagtgcggaagctcccgagaagtataagatcaaaggttctttcggtcatccagttccggtagtagacggaaaaacacagtcctccggtgccaaagcgagcgccattgtactcaagaaagaatttacggacgtaaaagatttgctttgtattgactatacttcggcttattccacccccagtctggataagttggttcgcattttcgtctatgaccgtcaagggaaaggtagctttactgtgggtgacgaatttacggccaatgcacctatccggttcgaaacagccataacaacacaagccaactggaaaattattgatgatacacatctcttgcttactaccggcacagaacagatgaccgttacgattgaagcgtctggcaaagtcgcgtttacttctgaaacgattgaggtgaactctccggcctatacacgtatcggtatttcactgaaggagcagtcgaaggacggatatatccggttgacgatgcgtacaaaacaattgtgataatgaagatactatgaaaaacaccgctatatcttatgattaaacaaggaggaagcgtatgaatactaattttgtatatggaattgagaactagttgtttggataatgaagagttcttcaaatatcagaaatcaattaatatattgatgcatactattctatctcctgttactctttgccacaaattgataactgaagaatggaagcagttatttgcccttatggatatcctttatggaaatgctttaaaaatatggttggctaaacatgattgtctatctgaagaggaaattgctctttgttatttctgttatataggagtaaaacataaaaaccaatctattttctttggtatttcattacaaagcctgagtaaacgtaagcagcgtttgagagctaaactaaagattccacgcggtatgtcttttaaagacgttgttaatgcgatataaagatcatattttgagagcaatgaacacagacgtggaacatttgaatctaaaagaaaatatgcttatgaatagaacacgatgtttaattttaatttctctgttagttgggatgttcgcccaagcccagacttcttctataaaaggtatagtgacggatgtcaaaacaatccctgttgagtatgcgaatgtcatcttgtatgatgcggccgacagtactaaaatcgtaaaagctgctacaactgacgtgaaaggtcggttcgaattatctaagattcctcatggtagttacaggctgtacgcttcctgcgtgggctatgtgggtacacatatacgtattcataatattcaggaacatataaaggacctgccaatagtattggaggagcagacggtagctcttgatgaaaccacagttactgcacaacgcgttgtgatggagtttgaccgtcagattatttatcccggtaaacaagagaaggagacggcgatagatgggatagatcttgtagacaaactgcaattacatggaatagtggtaggtaaagttgagggtacgatcagtggtgtgcttggtggtactgtcaaattgcgcgttaatggtggaccggctgatttgaatgatttgaagcagatagaccctaaaatggtgaggtgggtggaatatcacgacatgccttctatgcgttacggcaaggtggaagctgtcatcgacttgtatgtgaaacgtcagggatttggcggttcgggcagagttgatgcttcgcattcagcaatgtccccgaatgggaatgggcttgccaatctgaaattgtatcattcgaaatccgagttctcttttttgcggtggctttagcgtttggtaagcgggcagatgtatttagtgatgagaagatatattataacagttgggaagttacgtccggaataatgtacgtatggaaaaactggaatttttcaggtcttatgaaatggcgtttgggtaattcgtatgctttttgggagaagagtatgaatccttatgttgtaagtgatatgcgccattatctacctgatacagagaagcaacttacacttagagttgcatggaagtttaagttcggtcatcagcgtaaaagtgctagtcaacgtattgaaaatagtggaggagaaagtgcggtattttaataatggaatgtccattcatcgaattcagagtctcgccggcttggggaagatgctgagaatatcgtatttatatgtaacgaaaaaataataaaagcgtggatttaaatgatttaggccgtttaataatggtagttattgagaatagttataatcttaaattattaaaatgatcaaaaatgaagaatataaagaaaattaatcttgctgaggttagtgataaacaagctcttagcatggaccagttttctaaaatcattggaggtagtgtagatgatacttgttcttcgggggggatgtgccggaggagttttggaagtaaatacaaagctttgtgctaaaaacggtgtttgtacaagtggtgtcattacatggagaaattatggattcctttaactccccaaacaccctatgtatgtagaatgtctggagacgttagcggagtttcttagtccctcttacctccctttgtatgaaaaggcactgaaaaggatgcaacgttatggatatatccttgaacgttttatctctcctgaaggttatttcccgtatatcatattatcgtctgacggaacataggaatgcaaatgtcgcccgcaattatggaatcctctatatacacgggaggaagtaattaaccattatcgtaaagcggtaacacactatgaatatttacttccattttatgattatctgttgatattgaaacctcaaaaccatgttcaatcatggatgctaaagatgaaatatgtttggaaggtacttatgatacgaattgaatgagttttcagacttatactatctccactcgttccagctcccaacagaagaacctgaaaaaagcaaatcatttctcatacatcaggaatgttattctcatcatctaatcgtcaacacttaataaactgtagcaaaactattgttcatctccgctataactaactgacaatcaaagataatcctaatgcaatcaattgattttcaataagaaatattaatcgttccactctagtgaacaggcttgtgtactggagtgaatggttatgtctactcgagtgcataggcctgttcactagagtggaacgatagaaatgaaggcagaaaaatgcagcgatgccggttgcgaaagatatgtagtctatcgactcaacatacaaactacggttatattgcctcccatatattagtctcttgaaacaaagacaagcataatatgcagtatgagaaatgccaatatatagtatgagaaatgcattgttttaagcgttttttcttgataaagctatgagaaatgcatgtaaatattttaattctcataattatatatctaattatcaggcaagcactcctttttatgagaatatgagaaatgattttgttttttcttttctggttcaaatttggtaatggtcttttttgatggttacttttttcttgtccatttttttattggaaaattagtgtaagtgtttagttattagtgataaaaaagttggaaaatgtctaccgtaatttttggatgttagttagtatcttcgtaactttggaacacaagttagatgaaatattatgaaatacaaaatgacatgctgattttattttggacgaaaatacgccgtataaaattctctatttacgatcaactgagaatggatgaactgtcgcaaattttacctggcaatatacatatcacatatgatcgggataaaatgtcggttgccgatgttgtgatgttgagccttctttttttatatcgtgaattagaagacgatcttgaaaagcctgaacaccagatttgggtggtgtggggctatgaaagtgaagtcaattatccttggatgttttctgacgaattgaaagatatatttgacctttggatgacttatcatttggattcggatattgtgttaccttacagactgactaaaagaatgagaagaaggctttctttttgtagatatttgtaaagaatgtaagtataaatagttctttcagtcagcccgttcatttcttaatcttaaaatagaaaaacatgagaatacttcaaaaagaaagagcagtacgaaactggccaaaactttatcgaaaaggcgaagatatattacttcataaacaatctgctaaaaaatatagagatgatcagttgaatttcttagaaaattatagtcgtcgatatctggtttctgacgaattctatgattgtgccaaagcgtctataaataacagatatatctatgatctctatttccctatggtaaacaagcaaatattgagaaaagatatacctgagggttattttgatgaagatttgcgtgttactaatagcttatcaaggttatatatcactgcattatggtacttgtacatatataattatactgaggatatttataataactttgatttggtttataatcatattatcaatgattttgaaggagatgagagagcttatctgatgagtgctatgattgggctttttgcttccaagaatagtacatcatatagtgaacagttgttaaatgcaatagagaaagcttctcaatatacacaaaatgaggtttgtttgaggtatatcgagaaagcgaaaatgttttatactttattggatcggcaaattcttgaaaatattctggagaacacttatttgagatagaatataatactgaaagtaaattatcactgaaagatgttctgcaaaagtatgaaggtaaagcggtatatatagatttttgggcaagttggtgtatgccttgtttgaaagagattcctaaaatgaaagaagtatataagaaatacaatgagaaaggattgactattattggtatatcattggatagagtcaaggatagttggtctgaggccataagaaaaaataatttgaatgtttggccacaaattttaagttctgagacgaatgagaaagatgaaaaggagaataacctgtcgtacctatacaattgtgatgctattccattttatgtcttgattgataaagaaggaaaagtcgttgctaagtgggaacatataggggatgtgcagttgaaagagttagatatgcttattaaatagttataaagagacaatatatgaaaacaactttatggacaataatgttattgtgtgcgattaataatatatcagcacaggttaaaagccaagtaaaagaaagctttgagttgacaagtattgcatttcgattggctggtgcggaagagtatataaataatactatccccggttatacagccgatattgataattacttctcaaaatatagagaacataagctcatctcttacatcaaaaagataagagaggagcaaggaatagcttatgatgctgtacctgcggcaactggatgtattgagataaagagagggaaagtgattattgatccacaatgtgacgcatcaaagataagtatgattgacagtaggtggacagaggaaagtttcagaacatttgtccgtttattgaatgatttttatagacaaacaaaatttaaggatttctatacactgcatcgtggcttatatgatatagctgaaactagattgaatactattcttgtcgatctgaatgcagagtggtttaaatctatgtttggcgaaggacctgaaaatacaatagtggttgcatctctttgtaatggacctggtaattatgcttttaatggaataacaaagggagaaaaacgtggaattgttattggatgtagtaccgataaagaaggaaacccggcgtatagtagattccttataactgtcattgtacatgagttgttacaccactatactaatccttgccttgctcaatattggtctcagattgattctgcttcgcaaataatttatcctcacgtgaaagaaaagatggccaaactggcttatggaagtaccaattcaacgatgatagaatggtttaacaacctattgactatcatgtattttaaagataaccctaataggggattcactgctacacatttaactgcatggaggcaacatgaaggttttatctggatggaaagaagcatgacgtttatggaacattttcgtaatcatcgtaatttgtattctaccattaaggattttatgcctgagatagtaagttttgtcaactatacggcatctgattttgataatgtattgaaagagtacgataataaagaaccctatattacagatatatttcctatttcaaatagcatattacctttaggtattgatactatacaaatacgtttctctaaacctatgtttggtgcttatggtataaggccgttggatgataaaagaatatcgccaccttatacagactatcagccgttttggaaagataaatatactttttgtattatattagatagaagtaagctggagaaaggaaagacctatgggtttaaattaaatcgcgccttctttcaatcagagaaaacatatccaatgaaagaagattttccttacacttttaaaatgccggatgaatgaacagtttatcgatttattgattggatttgtatatttttgagttacatttgctgtctattgaataaaaatgtctcatttaatatagaataccaatgaaaagcaagttattactaacgtgtacagctctattattctgtacttgttttctgcatggacagagtcaagcttctaaagtcgtaaactccggtgaaaacagtcatagcgggtgggttcaacatccgtggcaagggaagaaggtaggatatataggagattctattacagatcctaactgctatggtaataagattaaaaagtactgggactttctacaagaatggttggggattactccttatgtatatggaataagcgggcgacaatggaacgatgtgccccggcaggcggagcaattgatgaaagaacatggagaggaagtggatgcaatcattgtcctgatgggtacgaatgattttaatgccggtatacctattggcgaatggtttacggaaacggaagaacaagtgttggcggcccgtggcgaaatgaagaaaatggagacccgcaagaaacgaacccctgtaatggacagtaatacctataaaggacgtatcaatatagggataacgcggatgaaacagctgtttcctgataaacaaatcattctgctgactccgttgcatcgtgcgtttgccaatttcggagaaacgaacgtgcagccggatgagaactaccagaatagttgcggtgaatatgtggacgcttatgtacaggcagtcaaagaagccggtaatctctgggggcttcctgtgatagactttaactcggtgacagggatgaatccgatgattgaggaacaacttatctatttttatgattcgggtttcgatcgtctgcaccctaacacgaaagggcaggagcgtatggcacgtacattaatgtaccaattacttgcgttaccggtttaggcaacgcgcttattgtcccggtttgaagaatagccggaggacaaaccatgcatgatgtgccactgtacttatcagcccgtaatgttttgccatgatgcggaatctttctttgagagaagccttccggttttgggtggtcataccttcgtcaagatagtcgatgattgtcaggtgcgtattgtgcaatgtgcgggctttcttcatgatgcggacgcaccagtcgaagtcggcggaataacggaactttaagtcgtatggctccaccagcgtatggcgggcgaagaatgcctggtggcagaccagcattccctgtttgaagcttttccaggttaatacttccggggcagatagacggcgcatacgttggaaatgcctcttctcgtctacgatagccgtttctccgtaaagtacgtcgggaagttcgttaccattgatagtgtgcaccatttgttgcagcgtgtcgtcttcgtgaaagcagtcgcctgcgttcagaaagcagagatagtcgccgctggcgagggcaattcctttgttcatggcgtcatacagtcccttgtccggttcgctgacaacagtatgtatccgtgggcggtatctgtcgatgatagataaagtgccatctttggaggctccgtccacgatgatatattctacgtgatgataggtctgcgcaatcacactttgaatggtatcttcgagtaccttttccgcattataggtcaccgtgatgaccgaaaacttgggagtaggatgaacgctatgcatatttccccgttactttattgtagagatccgtatatttcttggcaataatgctttcggaatagttgcctaataccttgcggcaggcttgtgcggaaagctcgtcatattccgggtccgtcagtatccagtgtataccgttggcaaagtcctccgaagatttgtatcgggccacatatccgttgtgcaggtggtcaatcatttcggggatgccgccgacattgaatcctacgcaaggaacgccgcacgccattgcttccataatcatgttgggaagattttcttccagcgaaggaatgacaaacaagtctacggcattatatatattgaccacttcgtgctcattcttgatgtaaggcaacgggtagacatggaaaggaatctgttcctgcaactgttgggactggttgccgaatacgacgactcccagcgactctttccattccggatgtttctcagccagcagtttgcaggcttcgattaaatattcggcccctttccgcttatcggtgatctttaccgagccgaacagaatcagcttcttgttttgcggcaacatacatttggcccgtgcctcttccttgttctgtggcttgaacaggttggtattgatcgcgttcgggatgttgataacgcttttcccttcgaacagcctgctgacctgggcctgttccttcaaccaacggctgcaagtgacgaaatgaacgggggcgttgctatacaatttctgtttcttacggaaagtgcggtaagataaatctttcttgctaccgcctttgtagatgtacgggcagttgtggcactcctgttgatagttcgtgcattcgcgtgcataatggcagataccggtgcagggccacatatcatgcattgtccagacgaccggtttgccggaagtaagtatcttccggatgtctttcaatgaaagcattccctgattgatccagtgcaggtgaatgacgtctgcctgccgaaattccggaagagaggtaatgtccgttcccgtgttggcaatgtctacatcgaacagatgataccgttggaaacggttggcgctccagataacgatgcgttcccacatgaacttccatacttgcagccagctgcgcttcaaacccacaacgctgatctggtccgtttgcttgtcgcgcaccagcattttggctttaataccattattcttgagtgattccattaaccggccggctgcaatggcggctcctccgattcgttcagacgtatttataatcaggactctcatgtgcataaaagtttatgcaaatgtacggtttttagaggaaaagtttgatatttcctgcaagctttctgctatttcacgtgaaaagatttcgagattgaaacgttcttccgccagtttgcgggcgttgttgcccatgcgtcgtgcctcttcggggtggtcggcgatgtagcggatagcgtctgtccaaccctgcacatcaccgtattctacggtaatgccgattccttccttgtcgatgtcaatttcgaaattggggttacgcgaacaaatgacgggaatgccgagagcaaatgcttctacgagtgtggtgagccctacggtatagggaaaatccagacaacagatgacaatacagcttttccgcgccaccagtttggcaagctcgtaggggattactccgtcggtgtaatgtacatggatagagtcgggcagggtgaaaccgtcaatgatatttttataattgatgttaccgcatgagacggcgatatataagtcgagtttctctttagtggcggcaaatgcctggaagagagtgcttacgtcccggttttctttgccggtagagataaagccttccggtttgcggtcgggcatttccgccaacaggtggtcatagaaagggaggtctggtccccagtgtaccagttttagtttatgggcaggcgctttccgggttttcaacgaatcctgaatgagcttccggctgaacaggaacatcttgtctatgcctttatagaaaaggcgggatatttgttcgcgtgcgaaaccggaactgttgactactgccgtgtggtgccagataacgatcggcttgcggtatagccccagtgcacggaggaaaatcaccggttcgataccacggaaagaggtggcgtagagcacctgatatttctccttgcagaacagaatttctttcgttgcgtagagcatgagcctcaggcggcttgagaagtaccggcacttgtgcatgacggaacgtatcccgtgtttttccagcaatggaagtccgtacaagatatgtccggggaatttatactctttccattcctcgtaactttcccgcgtgaggcgggtatggtagaaataaatcgtaagtggttttagtgatgtttgtttctcttcagccatttgtttattcggtttttaacagctttcgtaatgatagaaaaattaccgtatttcaggttgaggaacagttcctcgaacgagcgtcctatctttatccacgggtggtcccagcacatgatgcggtagacgctttttttgtacgctacattttcaatgacgtagcggggatgtttcagaggaaactccgcttcgtaacgcttcatggtgaaaatgcggcggtaacctttgggcagcgtatggacggaaccggcaaagtgggtggaatccgccgttgctcccaagttgttaatcatgttgcgtgtgggcacaatgctcagtccggagttgaacagtatggaggcatggaaaatggtttcgtaaaaagccttctggtgttcgcgatgacgccggcacatatagatgaagtcgctccggaacttgcgttctttgatgagttgttcgagttgctgcatattgaaggagtcgtccagaaaagtatagaactcgtcccattggtctacgacacgtttccagcttgcccacccccagatagagaaggtggtggcgaagaaatagtcgtaagggatgtctttgctgatttcttcggggttgaatccggcaatcatgctgatgcgggtgtcatgttcgtacttgtccagcatttccttgcagaaacggaagaaagagactgacggcacatcatcatcttccagtacaatgcatttgtcgacttttgagaaagcccatttctgcgatatatattccgaggggtcgcaaccgaagttcttttcctgatagaaccgttctacttcgcactcccagtctatctgcgacacgatttcgcggcaggcttttatcccgggaaggtcgtgttcgtttcgtgctccgtcctgatagagaaacagccgtgacgggcgtgctttctttacctgctcgaacacttgcgataattgttgcgggcggttgaagaacagtatcagtaccggtacatctactaaagcgggtttcatattcatagttcttgttttggagtcgtactgaatgaaagggcggcagggtagtgattgttcactttctcctgttcttcctctgtatatcggtgcagggtcgggtagttgtatcgcaggaaaccttccaggttgtcgggagcgttcactgtgagcggtccgaacggcaccggttgcaggtggcggaggctttctccggtcacgtggtcggtggtagtcatcacgttgttgaaatacttcgtgttccatgaattgaagcagctttgaacggctaccagcatacggtaaattgctttcttcgagaaaagaacatcgactgctttattcaagaagcaggagaaggctccccggtctgtgggatgttctatctcgcatttgccgaagtgtttccacatccatatctcttttcccatgaggcaacatttgaggaaaccggctgcgtcgtactgtaatttccgcaacagcttgttgtcgggtatcctgtcgaacgggaatatatctacaaaaatacccggatgcatcgggacattcttgaacatttcttctacaaagagggtattgtttttcttgactttggcatagtaataagggctgtgcggatctgtttctatccatgaaaggaagtaggaatcgcccagctcccggggggctacttcgagaaatctgttgtagtctttccgtgccatgccgatatctatatcgtcgtcccaaggcagtatcgcccggtcatagagtgccccgattgcagtaccgcctatcacaaaatacgggatgtcgtgtttccgacagatacgaatggtttctcccaatatgtcgtaaagctcggcatgtaacaaatcaagttcttttgctgtatatttcttgtccattggaaacggttgatgcacgttatgatacaaatgtagtgattaaattgacaagttcctataactttaagtttccttgtagaaattccgccgccatttggctgcgtcccgggatagggagggtggctgcttgcgggaaatcctcaagcaaacagtcggcaggactgatgtccggatagaacttcttgagcaggaacaggctgggcccggtggtgatgcttcctgtgaatatggaagcgttcatcagtacctgtatggaagaaaggaaacgagtcatttgcttctgtttcaactctttcgtcgtttgcgtgaaagcactgttgacatatcctttctcgccggaatcgcatagggtataccaacgtatgtccggggcgagcgactgtacttgccggaagatgcggtaatcatctgtcagcacgaagacatcgcgcaaatcggttttctgtttgatgaggcgtatgtaatactctgccggaagcaggttggtttcggtgaccttgtcgcctccgcgtatctggcaaccgacgtattcttgcgggagttgcaggttgtctgccaggtgccggcattctcgtccggttacttcgttcaacttccacgtgatttccgtcattttccggaaagcatggagataatccccgtctatacccagttcggggatgtggaagtgttggttgggatcgaacttcaggtggcagttcagtaataccggttttttataggtcaggaaagcgagagtctctccggttatattcttgcaggttgctttcagtttccatttcatcagtttggtcttgggcaatttcttgtccttcatcaatgctttccacgaaggcaggcggtgggtgttgtaggtgtggtgaaacgcttcgtgcacttcctcacagaaggggacgaaacagtctgtccaacctttctcccaaccgaagttggcatcgtcggaatagagcttgaactgtatcttgtgttgcaggcaatagagcattgcatgaagcatataggtatattcggtgaagaatcccgcgtctatgcccaagtgaaaaatcatcgtcttcctgaaagaactgttcagcaggcgataggtggttgtaaggttattcgcgctcatggtgcttggggtttgggttgagctttttgaaataacagtcgtggttgagatcttttctccagccttgccagatacctctggcgagtgctttcagtttctcccatttgttttcttccataaaaaggatatagaaaggacgctcccaaatgagcttccaaagcagttcgggacgtttgaactcggcgtattgcttgttgaggtacaagaagttacgggctatgtagtaggtacgcaccggggagtagttgagtgacatcgggtgccagatgagtatttgtttccggagcggatgtcccagttcatgtttcaggttggcggcaggtacgagcatgacttttccggtatggcggcggatgcgcaggaaatattccgtatcaatggcatccatgacaaatttgtcaagatacagaccgactttttgtatcgttttcaacggaaaaatacttccggagataatcatcccctgtgcttctttgagcggcgcattgctgtctgtgccagaagcattgatgagaggaatataagcaaaatgggaactgtctttgtcattgttgataatacggatatagtctttgaatgtggaagcggtaaaagcgctgtcctgatccattgtcagcaggtaagtatatccgttgtcgagggcgaacatcgctgcggcattgagtgctttgccgataccggtgttttccccttggcgtaacctgactattttgtgggagatagattccggaaattgatagttactgcctccgggggtgttgtcccagacaaacaatccgtccacatcttctgcataagtaagaaggttgtcggtgatgtgtgcgggtggataatagagtgtgacgagagcgagtagtttcatgcgcttttctttttgataaaatagtgtatggtttccttgaaagttaccgaacggctcgcccacatggctgctgcataaagtgccattgccagtagtatcttgcttgccaggcgaacatagatgttttcgatagggcgggtggtgtagtaggtaactgccatgacggaggctgctatgatggcgtagggaagaatatcggccagtgcgtggcgtagtttcaacccgatttcaagctgcacgaagtgatgccacctcagtagccatagtatattggtcgagacatacatggcaagcatggcatatattccgtaagaatgtaccagaagaacgcctgtgagcaggatcatgccgaggattatgatgttccacataaagatgcgtgactttcctttgctgatgataagttgctggtaaaggttggcaatggggacaaaagctccgctgatacataatatctgcatgatagatacgctggagtaccatttgtcggtaatggagataacgattaattcttccgcaatgattcccagtcccagcatggcgggaaatgagatgaaggcggtgaaacgcaacatcttgcggaatacccgttgctgtcggtcggtatcttccgatattttcgcaagtaccggttgtgccactccgtttatcatgcccagtatgaattgttgtcccatgccgcaccatttgttggactggttgtaatagcccacttctatcttggagtagtacttacccaatatgacggagaagagattgttgttgatgtgattgaatatgttggtaattaacagtttaccactgaatccgaacatttcttttatgggcgcgaggctgaattgaagcgtaggccgccaacgggtgaaatgccagtaacaggcagtgttgacagctacgtagacaatgctttgcgtggcatatccccagtaggaaaagccgagataagccagcgtgacccccgcaatgccggatacggtcagtccgatcaccgaggacatggcctgctgcttgaccattagattccgttttagataagcactgtgtgagattcccagactggcgatgaaaaagcctgtaaaagaataacgtgccaacggcgtcagttcgggaaccttgtagaaataggctatgagtggcgcgcacaagaacaacaccaaatacaggcacaggctggttatgatattaaaccagaatacagcattgtaatctttgtgtgtcacctctttcttgttgacaagagcggccgtgaagccgctctcctgtatcgagccggctatgagggagaaaatcgctaacatccccaccattccataatccgacggggtgagcagccgggcgataaatattccgaaaacgagattcagcaactgttgtataccgttgctgaaccctccccagaataatcctttggctgttttgtcctttagtgattgttcctcgctcatttcattatttcacttcactacccggcttcacttcccgttccggcataatgactgccaggctgccgtcgttgttctcggcactcagaatcatgccttcgctgacgatacctttcagtttgcggggggcaaggttggcgatgaaacaaacttgtttgcctaccaattcttcaggtttgtaatgcttggcaatgcccgacacgatcgtacgcgtttccagaccgtcgtcaatcttgaattgcagcaacttgtctgccttcggtactttctggcattcgaggatcgttcctacgcggatatccaactttgtgaagtcgtcaaattcgatgtttgcccgaatcggattcgccttataactggcttcttcgtttgctttcttcgtgtcaagcaacttctgtacctgtgcttctattgtggcatcttcgatcttttcgaacagcagttccggcttgttcaactggtgaccgacggggagcaggttgtcttttcccagttcggaccattcgaaggtgtccatgttcaacatcttgcggagtttttccgagctgaacggcaggaacgggtcaaaagcgatcgccagattggcaaccagttgcagggagatgttcaggattgttcccacacgttccatgtcagttttcgccagtttccacggttcggtgtcagccaggtatttgtttccgatacgtgccaggttcatggcttctttctgtgcgtcgcggaatttgaatacgtcgagcagcttttctacttcggcttttacgtctgcaaattctttcagcgtttctttgtcgtagtcggtcagctcgccttgtgcgggtacgcatccgtcgaagtatttctgagtcagcaccattgcacggttcacaaagttgccgtatacggctaccagttcgttgttattacgggcctgaaagtctttccaggtgaagtcgttgtcttttgtttccggtgcattggcagtcaacacatagcggagtacgtcctgtttaccggggaaatcggccagatattcgtgcaaccatacagcccagttgcgggaagtggagattttgtctccttcgaggttcaggaattcgttgctgggcacgttgtccggcaggatatagctgccttctgctttcagcatggcagggaatacgatgcagtggaacacgatattgtcttttccgataaaatggatcaaacgggtttcgggatctttccaccatgtctcccagctgtccggaagaagttctttcgtgttggagatgtagccgataggcgcgtcgaaccaaacgtagagcacttttccttctgcgccttccacgggaacagggataccccagtcgaggtcacggcttacggcgcgtggttgcaaccccatgtcgagccagcttttgcattgtccgtacacgttcgggcgccattctttatggtcttccagaatccatttgcgcagccagccttcgtgcttgtcgagggggagataccagtgtttggtttctttcatcaccggtttgctgccgctaatggcgcttttcgggttgataaggtctgtcggtgagagtgaagtaccgcacttttcgcattggtcgccataggcaccttccgagtggcagtgaggacattcgccggtgatataacggtcggcaaggaatgtttttgcttcctcgtcgtaatattgttcggatgttttttcgataaactcgcccttgttgtataatgttttgaagaaatccgaagccagttggtggtgcgtcggtgaagtggtacggctatacacatcgaaggagatgccgaattcttcgaatgatttctttatcagcgtatggtaacggtctaccacatcctgcggagtgattccttcttttttggcgcggatcgtgataggcactccgtgttcgtccgaaccgccgataaataatacatcttctttctttaaccgcagatagcgcacatagatatctgccggtacgtatacaccggccaaatgaccgatgtggacaggtccgttcgcatacggcagggccgatgtgacggtggttcttttgaatttcttttccattatatagcgtgattttattgttttctgctttgcaatgtgcaaagataatgacttttcaccatggattacatggattaatacagattatttcacttaaaatactttttcatcctgacgaaaacttacatcatcatatgcctgcgtatagagaacttcactattgccattgcattgatcgccgcaaacggtatatccattggttcatggtgggtgttgtagctcaccagtttgatgcatccttccttttcggaccggttggcatacttcaccgccagatactcgtctccgtcgatcatgaacgaaaccaggtatatttccccgtaaataacgctctcgaagctgtttatctccttatatccgatgatgtcccccgatttcagtatggggtacatactgtccccgttgacgtagaccgccccgtcgcaggcggatatgttcggaatccgtattttccccaaggcatactggtgcttgttggtgaacagcgtcttcaggtttgccgccgccgtgatgtcgtatagtgtcacgctgcggtcgtcaaccggttcggctgttttgggattgtgaattatctgcacctccccttgtgccagttcgctttcgcaaaatctcgactggtgtttcgggttgccttttcccaacaatagccagttgtagtctaccgtatttcctaatttgttgagcagcaggcggaaatctatactgttccgtgcagcccagttggtgactgtcgctcttgaaactcccaggaattcagccagttcgctgtccctcttcaggtttaatgcctgcttggcacgtttgatgatgccgggtacatccagatttgtatccattttgttagcatttaattttgatgtaaaaaatcataaacgtattagttgctcattaataatccgttatctgttttttaagaattaatttctaaaaccgtatgttttctttatgaaaacttatttatctttgtagcggtgaaattacaaatatgtttcaaaaatataaattaaaaacagaatagccatgaaaaacgcagaaaagtttccgaaaggttgcagaaaagttcgtcccccggccttgcatcccctttgtatcactgctccggtagccatatatatacactgtgatgaatatctagattcaccatggtaagcgtatatgtccaccatgtcggacatacatctccggcaaataaacaacttttttctcagaatttaaatcaaaattatcattatgaaaacaacattatctttatcgacaaaacaatctacatccagcagtatttgcaagagttgtaaacgtgagcttccgttggagtccttctatatgaacaaaaaaacgcagtctccggataaatattgcaaggagtgtcgcaaatctctgagccgaaggcaatacggcagtggtaagaaacttccccattgctctttgtccggtggacgagtttcctatccggtcataacacagactgaggaccgggaaacacgtctccggcttattctgcacgctcttcaggtagtgaggcttagcatggaacgcaaaaaggcgggaatgcaggaagaagccttgctgtaaaagcgggttttttatattgagtatttatcaaaaaacagaattattatggcaagaataaagaaaaagggattggattatttcccgctgaatacggattttattcacgaccgtgccgtccgccgcctgatgaagcgtgagggtgactccgcgcttggcattctggtggaaatcctgtcgtatatctatgcgggcgaggggtattatgtccgtgcggaccgtttgttttacgaagacctctcggcgggtctgtacgagaagagcgctgatgacgtggaacgtatcgtccgtctggcggtggaatacggactgttcgacgcggttctttttgagcgtagctgcatcctgacttccgtcgaaatacaacggcagtatcttttcagtacccgtcgccgcagcatttcacatctggaagccgggtattgcctgcttgcagatgatgaaccggctgataataaggttgatatgaaagaacagccggccttcgggagtgaggaaacggagggcggtaaaagcgttagcgtgggtgataatgttacatttattcccgaaaatgtaacatcaggtacacatagcatagcacagaatagcacatcagagcatagcgtagcacaacaaagcaaagcacaaccccacttcaattctcccctgaaaacggcaggggagaaggcggagaggaagaagataggagcggaggagatttcttccggaagttcctgcgggcgggatgtttccggttcggggaaacggaaaaagtggacgcaggagactgtcgatgcccttcttccgccgtctgacgggacatcgcgtaactatgcggggctgctcgataatctccgtagctacggtatcccgccttcagaacagtatgcgattatccttaaaagtaatttcggggctatcggcggtgcgatctggcgtgggattgccacgttgcgtggcagtggaggcaagataaaacttcccggacgttatcttttaagtgttgtaaataggaggttggaaattgataattattgatattcaattatttatattggttaagaatttggttaagacacatattgaaaatctcttgtatatgaaatgtaactgtcttatctttgtgttgtcgataagcttacagacaagactaaactcgattaattaacacaaaaacgaattggattatgtatttattacggaaaatggtattggcgggtttattgttctccgccggagtgaatatgtttgcgcaggagtctgcctatgcttatgacgcaaacgggaatctgacaaaagatttaaataagaatattgttgatattcaatataattctttaaatttgcctagccggatagtctttaaaaatggcgacaacatttctcatgtttacagtgctgacggtagtaagctgcgtacggtgcgggttgctgacggagatacgctgacgacggattattgcgggaatgtgatctatgaaaacggggttccggtgcggttgatgaccgatgttgggtatatagctttgtcggatacgagctatcattatttcatcaaagatcattagggcaatgtgcgtgtcgttgcggatgaacatggcaatgcggaggaagtgaacgattattatcctttcggcggattgatgtcgacaagttcccggcagagcgtccagccgtataagtataacggaaaagaactggagacagcgtgcggggtgaactggtatgattatggtgcgcggcggtatgatccggtgttgggaaggtggaatggagtggatcctctgtgcgaagactattattcagagaacccttatggatattgtggaaataatccggttaactatgttgatccgaatggtctgatgaaagtgctctataatcctgatggtacttataaggaaactacacataataattggtttcataatacgtttatggggcggcaggaatatattgattatggtgatcgaaaagtgcatctttccgaatctgaattttggcaatggcagaggagtggaagttatgagaatgtaggtccggtaacagattttgttagtaatttggagcttaccctgaatgaaccggcagcaaattttgccgacggagttgccaaatatatggtatcgtcagcttattcatctatcaattctccgaaagtatggctgacgggacgttcttgggcaggaacttatgcgacgcccgatgaaagagccggcggattcattgatgtggccactcaaagattgcccgccgttcacttgttgaaacaattgcatcccggttcatggtataagtttaaatatgccaatcggcatattcccccgaggagtaggcgtgtagtttacgatgtggaaatgagaaaatttgatgaaaggattcgcaatccgaaaacttttgagaatttgaatgatggaatagatggtataatatatattaataagaatagagacaacaaatgagaggtatagattattttggtactttgattatgtggctggcggtttttatcggctggttgataaaaggatgtaaaaccaatctttttaaagaatgtgcgaaaatagaagattctacaaaaagaaatgtgggaataatttttgcaatatttcttatagggccggtttttttaggtgagtgtcgtggcggttaatttttcatttgttatatctttgatatgcagtttattatgttttttattgattgtatgttaatagtttaatactagaaaatatggaaacaaacaaattctctgtcgtaatgtcggaaaaggttgatatggagttagtccgaatagtgacttcggagcgtgctgattatcagcctgaagctgtaatcgcagcagaggaggaactgaagcggcggaatatcactccgtccatgtatcaggactatacgaaggaggtggaaaaacttatcgaagtggaaaaggagaaagaggtcgagaagcagcgtcttcctttatctgcgtgggtaaaagcgatagcctttcttttcccttttccattgttgcttattatagggttggctcttatattgtttggttatcaaacatgtggtaaagggctttgtaagtggacacttctcggatggttattttattttatccttcttatgttttgtgaaatattcctttagattatgacttccggtatgaatcaactttttgttttgatgcataccggatttttttgttttagacttataattattcctccgatttcttattgttattcaatgcattactggtggttaagaatttagttaagacacatattgaaaattacttgtatatgaaatgtaactattgtatctttgtgttgtcgataagcttacagacaagactaaactaaatttattaacacaaaaacaaatttgattatgccagtattgtatggtccatttcagtccgttctgaaagacaaaaacggagaacaactattctatccccgtgtgttgcgcacaggtaatgtaagtacttcacagatctctaaagagatagcggcttattcctccctttccccgggtgatgtgaagaacacgctggacaacctggtgacggtagtcagccagcatcttcaatcctcggagagtgtgacgcttgacggtttcggaactttccgtctggtgatgaagtcgaacggtaaaggtgtgaaaactgtggacgacgtgtctgccgcccaagcttcactgacagttcgctttcttccctgttccacccgtcatttggatggcactatggccacccgttcgctagtgacaggcgcccggtgtgtccgtttcgaccgtgccgatacctctgcttctggtgaaggagagggtggcaagcccgaaggcggcggttccggcggtggggtgacaccggatccgtcagtgtgattctccggcacaacacagattcaaacgactaaactaaacgaagtattctgctgaacggcaggtgcttaactgaactattaattattcactaattatgcgaactatcaatttgttcgtggtgcattgcagcgccacgagggaggattgtacactctcccctgaagctttggacgtgatgcatcggcgtcgcggattcaacggaacaggctaccactactacatccgcaaggacggaacgttgtacctcacccgctcgctcgaacgtatcggggcgcacgcaaaaggcttcaatgcccattcgataggtatctgctatgaaggtggtctggactgccggggacacccggcagatacccggactccggcgcagcgggctacgctccggcaacttgtggccgatttggagctgcgtttccctggctgccgggtatgcgggcatcgcgatctttcaccggacttgaacgggaacggtgagatagagccggaagagtggattaaacagtgcccgtgcttcgatgcgtccagagaattcggggaatctgcaaccgaggcggtgagcacgaaagaacacagagtaacacaactatttaaagacacggaaaggaggtaaattatggcaatgaagaaatcagtatgggatatgatcctgaaggtggttatcgcagtggcttcggctttggcaggcgttttgggcgctaatgcgatgaatctgtaatgagaggcattaatatttttttataaaaaccagatgactgttatctaaaatgaataataagactattattttaataattgcgctgctcacttgtgtgggcagcgtatatagccagggcacctcgccggctttggctgatacggaaggaaaatacaaatataattatgttcctgtgtctccggtatcggaggagttgatgaagcatattatgtgtcctgttaattataatacaggcaaagttgaacttagtatcccgatatatgagatacgtacaagagatttcacgctgcctttacgattgcaatatgacagcggaggcatcaaggtcagtgcgggaaacggcgtggcaggcttgggctggaacgtggatttcggtcccaccgtaacccggagtattcaaggaaatcctgatgaagaagggtatttgatctataacccggactttggcagttgggacacttcttatatgcataagatgaccgaaggtatggcgcacgaacaaccggatgtgtttttttatagtacatttgatgctcaggggaatttcgtgttccggcgtcctgagaaatcctcggaaagcggctcgcatataccggtctatttaccgttgacttctgataaggtggaaacgtcagacatacgttcgggatttcaggtgacggacggttccggtaatatttaccgttttaaggaagccgaatactctaatacaggaaagattacaggctggaaactaacggatgtcaccagtctgaaacaggacaggctttctttttcgtatgtcacacagaagctcacttatgcagatagttatgactattatgcagtggaggatatgggtgaaagttaccgtaacggatattggcagggagtggatggaaaactgaagtttttccggatgaacgggtatgctttgcataatgattctctttgggccgattttacggtcgaaaacgttggccagtatgataaccggccttacaattcggttgatgcaaaatatcccaaagaaatcacgtacgctaatggaaaagtcgtttttgattattcttcttctcttctgaaaaccgtgcatatttatgaaaatggggcggaaatccaacgtgtcacattgaattataagcaactgcggttcatgggacgcagcctgcttactgaggtcaagtttacagagctggtcaatgatcaaagccgtagttatacaatgtcatataatgactacgtggatgactattcgccgacgcagaccaaagcagtggataaattcggatattataacggacggaccggtaataccgatcttgtagaaagacaattggtggagtttggaatgccttacgatggcgaccggggtgtatgttatgcttatattggaggtgcggaccgtacaccggacattttattcgcccaagtttattcgttgcagtctattaaatatccgacaggtgcaagagaggaattagtgtatgagctcaatacatatcccgatacagatgaatatgggaatgcaatttcatcttatgccggtggtttgcgaatttattctatccaatgccgtgatgtggaaggtacgctgaagaatgaacgtcgtttcttgtatgagaaagacggtattccgacaggttatgctcctcaagtgacttttgtcgatgagatggagaaactttatttgcgtacctactctcgtaccagcatgcgttatcgtttgtattcatccctgccggtggccgatgccggtgctgcagcgggagtctctgtcctatatcctaatgtgagtgttgtggagaaagatgattatggaaaaacggtatctcgtgaagactatgaatacaatacgaatttctattttccaagtataataaatggtatggtgcatgatgaggtgtcccattataagaagggcaaactggtcaggagaacggattatgatgtagatacggagcagcctgtgcatgatgaggagcatacatatactgaaatatctttgaacaataatactcctgtggtggcgggacgtgaagtgcggcgtgccaatctggttgttgcagaacagtccggtgtggaaacggacaatgacctttattatcgtgagtacaggtatagcattggtagggggaatacgcgtgtggaaaaccagctcactgtgaatacggattattatgctggtaagttggtcagtgatacggttgtccggacttatggctctacggactgggatatacgatccgggcttccggtgagggagatttataagtatagcgatggaaagaaaaagaaatgtgattatacttatccatatcatgttaatgatgccgttggaagggcgatgacggctgccaatgatatattgagacctgcccatataggagaatctgtggaaggtcctgaaggctatatggatgattcctttaccagtttcgactatactctggatcccggctccggttcggccttgctggacgaggtgagcgtctggaagcatgaggggctcttttcaatgagtgaatcttatcctgtacacgatgcttatggcaatgtttgtgagatccgccgtgcggatgctcctgtggtcgcattgctctggggatacaactacagtcgtccggtggctattgtggaaggggcgtcatatcaggaagtcgtttccgggctgcgcgtgagtgtggagtctcttcaaaaccttgacggcagtgcccttgaaaatgtattgcttccgttgcgtaatgctttccccgccccttgccgggtgaccgtttatagatatgctccgcaacggggagttgtctatatgaatgaacctaacgggaatgtaactacatacagctatgacggcttcgggagactgacggaaatccgtgataaggacggcgctgtgctggagtataatgagtataagaaatgaataagaaactgttaaaaggaaaaattatgaatataaaaagaatcattgttcttgtattgataagtgcaagctccggtcttctttgcgctcagaggaagactgtgaacatgagtgaccgttatggcatacttacggtaactccgcttgacaaatataccggagcagcctcgctgttgaaaacgaacggtgtgcgctccctgactgatgtgtcctatggggatggttttggcggtgtttctcagaagatacacgtcggaataactccgcagggcaaagacctgactgaaagttatgagtataactcattgggaaatttacagtcccgtactcttccggttcctgtgttgtcggaaggggcttccgggaactataagcaaatattaaagtcggcacaggagtattacgggcacagcaacgtctgttcacgtttcgcgtatgaggcttcccaccgtagtttactgttaaaagagtttggcgttggtgatgaatggaccggtaaagccgtatccaaaaaatatagctgtaatcttgagagtatacccgcccaacgttgcaagcgttatctggtatccgccggcggcgagctggtagagagcgatagtccctatgcagacggtagccttcgcggcatacgcagcgaggacgaagatggcaacatgcattgggaattttataatagtgaaaatcagttggtcctttcacgcattctggatggtgatacattttttgatacttattttgtctacgatgagtatggcaatctggtgtttgtgcttcctccgggttaccaggatcatccggatctggatctttatgcttacatatatcgttatgactatctggatcgtcttgtttataagaagcttcccggttgcgccccttcttacctggtttatgacgcggcacaccgtttggttttctctcaggatggctgtcagcgtaatgattctctttggtcattctttgtttatgatgtctatgggcgtgtcgttgtggagggcgaatgtagcaacagcgataaacatgttcggactgccggtgagacagttgttttaggtactcttatggaaggcgacaccggcctggcgtacagtggttatcagagctcttttgatctggttgatccttgtgtatatgtggtgaactactatgatacgtatgattttagaacacgaaacggcttttctgcatataattttccggaaggaactgtgagtgcgatcggtaatcttacgggtagcatactttgtacgcatggctcttcgggattcatttattctgcggactattatgacatcaataagcggatagtgaaaagcctgtcaagccgtgtcaatggaggcatggatacatacgccactgagtactcctttcaaggaagtcctctgtccgtccttcacacccatacggatagttccgggtattcattgacggaacgttatacctatacttatgaccattcgtcacgcctgacacgagtgagccaccaatacgataacaatccttccgtcttgcttttggaacacacttatgacgagttgggccgattgcagacagacaaactggataacggtatttatgcaacagactatgcctacaatatccgtaactggctgaccggtattgaaggcggtaagtttagccagtctttgcattataccgacggtttgggagtcccttgttataatggtaatatcagcagtatgacttggaaaagtggagccggggccactccccgcggttataaattcagttatgaccgtctgggtcgcctgactgatgcggagtatggtgaagggccgagcctttctgtaaataccaaccgttttaatgagcaggtgacgggctatgataaaatgggtaatatcttgggtctgaaacgctacgggcagacttcagcgacgggttatgatgtgattgatgatctttctttgagttatgccggtaaccggttaaagaaggtgacagaccgttcaaccacccctgccttcaataacggcttcgagttcaaggacggtattgatttgccaacagagtatgaatatgatgaaaacggcaacctgactaaagatttaaacaaaaatataactgctattcagtataattgtttaaatttgcctagtcgtgtaatgtttgcgaatggtaacagtatatcttatctttatgatgctgcgggtaggaaactccgtaccgtgcacgttctggaaggagacagtgttacaacggattactgcggcaatgtggtctatgaaaatggagtacctcagattctattgacagaagtcggttatgtgtcccttactgacggtcagtatcattattatttgaaagatcatcagggtaataatcgtgtggttgtagatgaggagggaacggttgaggaagtgaatcattattatccgtttggaggtgtgttttcttctaccggagatgctcagccttataagtataatggcaaggagctggatcgtaaaggtgggttggactggtatgattatggagcgagatactatgatgcagctttaggcaggtggcatgtggtggatccgatggcggaggaatattattcgattagtccgtatgaatattgtaataatagtcctataatatatatcgacccaacaggtatgttatatacaggttatacagttgatcggaacggatatattttaaaaataaataatgaaggaggtgataattacgatgtattgtataataaagagaagtattcctctgaaactaaaggagattatgataaaaccggtaacaaaacagggatacagataagtaaagggatattatcagggacagatgcgagaagcatgagctcaaagataactaaaggtgttttatatacccaagacggacagttgacaggaaaaacggtgcttaatcatgcatatgaggtaaaaaatgatcaagagtcagtgagtattatgaactttttagataaaaacaccgatgtggaatggagtaatactttgatggaaaataagcaaggtggtaatgtgaatttaataagtacaagccatgaagctaagagaatatcttttggaagttatcagattaacaaatatattcgttctggttatcaggtacttagatccgatcatattcatccgggagagggacgagtagcatcgggtgatacaggtgatatagggaatgctaaaaacattttgcaacattctcctaaggcaatttttagaatcctgaataaaggaatttattataattatacaaatgaaatatatagaaaataagtttaaaatgttatgaaaatggaatttaagcttttgcttactttattatttgctatcttctttgtgggatgtaaatcttatgaagaagtgaacaatcttaaattatatgattttgaggattatattaataaggaaataaaggtatatgaagtaaaagaatggctatatcctatacttgattctgttataatgaaaactgaggaggttctagcttgtcagaaatttgaaaatgaaataacattctctttcgaaattgattttaatggttctatgaattctgtagatcttgtaatcagtgttgaggattcacttgattcttttaatcatgcactatggactgatgctatattttattataaggaatataaattctattgcgggagaacttttctagattctttttttaaaaaagcagataaatccatttctctaacttgtgtaaatcctaaaaaatatcgttgggatatacctagaagaagtgaacataaactggaatggttctattgtatagaaatgagagatgattaaaatagcgtgttgctcagcagatctgtatcttattcttatataatcggattgttactatactattttattgataccttgatatgagactaaaaatacttgtgtcaaggtatcttttattttaatgatatcctactggaatataatatggtggggaatggataacaattaattagaaacttcatctatatataaaaagaatgataatatgatgaaaagattaggatatgggaagtaagttagttttattgctgacaggcatattaataccatatattttatgtttgtattaatcaaatagcactagtgggaattgttctgttcttttactcttttctccggaaaaagcaataagctcattataaatatcttaatgagtattgattgtgaaaccggtgcgttaattgtcagtgaatagtttatataaagctactccagtaataatttaaattccgttagtctacctataaagattaacggaatttttacgtttttaatccggtacaaataccgatagtagacttaacaaagtagtgaatgtgtatttatctccactgtttttaacgacaccggcctggcgtacagtggttatcagagctcttttgatctggttgatccttgtgtatatgtggtgaactactatgatacgtatgattttagaacacgaaacggcttttctgcatataattttccggaaggaactgtgagtgcgatcggtaatcttacgggcagcatactttgtacgcatggctcttcgggattcatttattctgcggactattatgacatcaataagcggatagtgaaaagcctgtcaagccgtgtcaatggaggcatggatacatacgccactgaatactcctttcaaggaagtcctctgtccgtccttcacacccatacggatagttccgggtattcattgacggaacgttatacctatacttatgaccattcgtcacgcctgacacgagtgagccaccaatacgataacaatccttccgtcctgcttgtggaacacgcttatgacgagttgggccgattgcagacagacaaactggataacggtatttatgtaacagactatgcctacaatatccgtaactggctgaccggtattgaaggcggtaagtttagccagtctttgcattataccgacggtttgggagtcccttgttataatggtaatatcagcagtatgacttggaaaagtggagccggggccactccccgcgggtataaattcagttatgaccgtctgggtcgcctgactgatgcggaatatggtgaagggccgagcctttctgtaaatactaaccgttttaatgagcaggtgacgggctatgataaaatgggtaatatcttgggtttgaagcgctacgggcagacttcagcgacgggttatgatgtgattgatgatctttctttgagttatgccggtaaccggttaaagaaggtggcagaccgttcaggcacttctaccttcaataacggcttcgagttcaaggacggtattgacttgtccacagagtatgaatatgatgaaaacggcaacctgactaaagatttaaacaaaaatataactgctattcagtataattgtttaaatttgcctagtcgtgtaatgtttgcgaatggtaacagtatatcttatctttatgatgctgcgggtaggaaactccgtaccgtgcacgttctggaaggagacagtgttacaacggattactgcggcaatgtggtctatgaaaatggagtacctcagattctattgacagaagccggctatgtgtcccttactgacggtaagtatcattattatttgaaagatcatcagggtaataatcgtgtggttgttgctgaggagggaacgattgaggaagtgaatcattattatccgtttggaggtgtgttttcttctaccggagatgctcagccttataagtataatggcaaggagttggatcgtaaaggtgggttggactggtatgattatggagcgaggatgtatgatgcggtgttgggaagatggcatgcggtggatccgatgagtgagaagtattatggtgtgagtccatatttatactgtgcaaataatcctattctcttggttgaccctaacggtatgtggcctacttggagaggaatcaggaatggtttaaacaatgctttaaataccactctaagttttactaatggagcagtacgtgctgtaacggataatatactgttaggaagtacttctttacgtgaaacgggaatatatagcagtgcaggtgcttataacgtaggtcaggatgttggtgatgtgattagcctttttataggtggtgcagaagtaataagaggttccggggaagttgccgccggtttattgggaagtccggaaactggcggagtgtccttggctgtttcaacaaaaggagtggtggatgttactcacggatcacttatggctacgagcggggctatgaagttattctctagaaaagggagggttaatgaaaatagtagcaatggatattctaaatcaagcggaaagaatgagaagcattctagtctaaaggcaaaagagtctgcgaggcagaaatatcaggatattaaatctcaatatgataaattgaatttaaaacagaataagactccagaagacaagaaatcattaaaaaagctcgagaatcaagttaaacattggaaaaagaaacaggattttacaggtgaaaatcatagtatgaatgcaaaagggaattggtaatgaaaaagtttacatttattgcagagtataaaaaaggtacttatattagccaatatgaatcttctaatttaatggaagcgctcgttatttgggctgataatttggatatacaatttttcacggaaaaagtgaaagctaagatccaagaaaaagttagagataatttttattctccggtatctatagaaaaggtagataatgtttggtgttctagttatgttatatttcggtctcttctgctgcttaatattgtagaaacagtttaggctgggattgttcatatgtattattgtccagacatagattgttttttaattaatcggtgtatggatattatttcccttctgtataagggctctttttgttataataatgagaatttgtgataagatgatagcttcacgtagataaatcaatgctgactataaacgttgttttgctcatcaatatcaaactgaaacattgactaaagatttatagtttgaattagtctatgattctgttcgtatttctcaaaaaataaatatggagatagaagttttgaataagaagaataactattatgaactttatcatgtgtatgaggataaagccttaggagataaggttgtgaaatttataggcttgttttcttctacacaaaatgcctggaaagctattaaagcattaaggcatcaacctggtttttgcctgcattctcaaaaatgttttaaactttctaatattgtatctattggtaattatgaatggaaagaaggtttttgtacagttgaagaagctttcgaatatcaaaaaagaatatttagagatgatgagtgatatatttttttataggttagatcatcgacatgtttatcatggatatgaagaatcgatgcatataggaacttttttatttcgtgaagatgttgagaaggtgatagatgaattgatagtacagccaggttttaaatcttatcctcgttcttgttttgtagtttgtaaaattattgttgatgattacagatggaaaaaaggttttattcacacagaaaagggtgattttgaaatagaataaagacttattttataatgattatcctaacataaattgatacttgaataaccttcctaccctagcataaagtataaggcttatgttagggtatttttttattatatggatggggtataggtgtacctaatccgaacaacaatctctttgctttataccggtaaccgactgaagagagtgactgacacagccttagcttttaataatggttttgagtttacagacggtgtccatgaagcaatagagtgggaatatgatgaaaacggcaacctgactaaagatttaaacaaaaatataactgctattcagtataattgtttaaatttgcctagtcgtgtaatgtttgcgaatggtaacagtatatcttatctttatgatgctgcgggcaggaaactccgtaccgtgcactttctggaaggagacagtgttacaacagattactgcggtaatgtggtctatgaaaatggagtacctcagattctattgacagaagtcggctatgtgtcccttactgacggtaagtatcattattatttgaaagatcatcagggtaataatcgtgtggttgtagatgaggagggaacggttgaggaagtgaacgattattatgctttcggcggattgatgtcaacaagttcccggcagagcgtccagccttataagtataatggcaaggagttggatcgtaaaggtgggttggactggtatgattatggagcgagacattatgattcggtgttaggaaggtggaatggagtggatccgtcctgtgagaaacattacagttggagtccttatgtttattgtaagaataatccggtattaaggatagatccggatgggaaggatgattatgtgataaattatcatgggcaacttcaattgatgaggaggacgaatagaattgttgatgttttatatgctagcggaacaagcgggacagtgtcgaaaataaatcctgaatggaagaatatcaaggtatttgacaagtctattttacctgcattggaaacaaatttaggcaataataccagtggtgctgattactttgcagaaacatctagcgcgtatgatgcggctaatatcgcaacatttggtattgagaataccggagttgagtggaaatatactgccggatacagggatggagagaagaaatatatcataggaaacagtagccgtgattatagtgtttctacattggaaggtataaataataatccatttgaaggctttcagccaatcgtggatattcattctcatcccagcactcaaggcgcatccgagcatgatatgctgaatgcaaaaggcaagaatggagtatcttttggagtttattttaaggataataaaaccctttatgaatataattccgtaagaagtaacctgaactctataaaaatgaactccatgctggatttaatgagatatacatttagaaaatataatgaaaacgatgaggaggagtaattgcattctgtttataaagatgatgatcctttcgaccctggcattttcatgccggggtttgaatgatcgtaaggtggatcccgtagtcattgcccatgccaaagcggtgatagattcgaattttttgcacagcccctatctgcaggttgcacagtatga
